United States Patent Application Publication US 2020/0085069 A1 - sequence listing, part 2

SEQ ID NO: 4 - DNA, 623929 bp, Bacillus subtilis
gcagtgaataggcccaggcgactgtttagcaaaaacacaggtctctgcgaagccgtaaggcgaagtataggggctgacgcctgcccggtgctggaaggttaagaggagcgcttagcgtaagcgaaggtgcgaattgaagccccagtaaacggcggccgtaactataacggtcctaaggtagcgaaattccttgtcgggtaagttccgacccgcacgaaaggcgcaacgatctgggcactgtctcaacgagagactcggtgaaattatagtacctgtgaagatgcaggttacccgcgacaggacggaaagaccccgtggagctttactgcagcctgatattgaatgttggtacagcttgtacaggataggtaggagccttggaaaccggagcgccagcttcggtggaggcatcggtgggatactaccctggctgtattgaccttctaacccgccgcccttatcgggcggggagacagtgtcaggtgggcagtttgactggggcggtcgcctcctaaaaggtaacggaggcgcccaaaggttccctcagaatggttggaaatcattcgcagagtgtaaaggcacaagggagcttgactgcgagacctacaagtcgagcagggacgaaagtcgggcttagtgatccggtggttccgcatggaagggccatcgctcaacggataaaagctaccccggggataacaggcttatctcccccaagagtccacatcgacggggaggtttggcacctcgatgtcggctcatcgcatcctggggctgtagtcggtcccaagggttgggctgttcgcccattaaagcggtacgcgagctgggttcagaacgtcgtgagacagttcggtccctatccgtcgcgggcgcaggaaatttgagaggagctgtccttagtacgagaggaccgggatggacgcaccgctggtgtaccagttgttctgccaagggcatcgctgggtagctatgtgcggacgggataagtgctgaaagcatctaagcatgaagcccccctcaagatgagatttcccattccgcaaggaagtaagatccctgaaagatgatcaggttgataggtctgaggtggaagtgtggcgacacatggagctgacagatactaatcgatcgaggacttaaccaatttgaatgtatgcttactgttatctagttttgagagaacactctcaatggtttggtggcgatagcgaagaggtcacacccgttcccatgccgaacacggaagttaagctcttcagcgccgatggtagtcgggggtttccccctgtgagagtaggacgccgccaagccattacacgcaagtgtaatatacggaggattagctcagctgggagagcatctgccttacaagcagagggtcggcggttcgagcccgtcatcctccaccattcctatcatacataagttggcgtattaagccggtgtagctcaattggtagagcaactgacttgtaatcagtaggttgggggttcaagtcctcttgccggcaccacctttatatgttatactatataagtctcttgtaataagagccattagctcagttggtagagcatctgacttttaatcagagggtcgaaggttcgagtccttcatggctcaccatgtttttcttgcggatgtggcggaattggcagacgcgctagaatcaggctctagtgtctttacagacgtgggggttcaagtcccttcatccgcattgccaaacgcggaagtagttcagtggtagaacatcaccttgccaaggtgggggtcgcgggttcgaatcccgtcttccgctccaactatactataccatccatgccggggtggtggaattggcagacacacaggacttaaaatcctgcggtaggtgactaccgtgccggttcaagtccggccctcggcacttattgttgcgcccgtagctcaattggatagagcgtttgactacggatcaaaaggttaggggttcgactcctctcgggcgcgccatacatacttttgaaaacgggaagtagctcagcttggtagagcacatggtttgggaccatggggtcgcaggttcgaatcctgtcttcccgaccattttggggccttagctcagctgggagagcgcctgctttgcacgcaggaggtcagcggttcgatcccgctaggctccacttgattttaattgttttttggcggtgtagctcagctggctagagcgtacggttcatacccgtgaggtcgggggttcgatcccctccgccgctaccattggacctttagctcagttggttagagcagacggctcataaccgtccggtcgtaggttcgagtcctacaaggtccaccacttatacggaggaatacccaagtctggctgaagggatcggtcttgaaaaccgacaggggtgtcaaagcccgcgggggttcgaatccctcttcctccgccatatctaatttaattatcatcgcggggtggagcagttcggtagctcgtcgggctcataacccgaaggtcgcaggttcaaatcctgcccccgcaaccaaaaaatggtccggtagttcagttggttagaatgcctgcctgtcacgcaggaggtcgcgggttcgagtcccgtccggaccgccatttataaaaaggctcggtagctcagttggtagagcaacggactgaaaatccgtgtgtcggcggttcgattccgtcccgagccaccatttaatttaatattgttttggcggttgtggcgaagtggttaacgcaccagattgtggctctggcactcgtgggttcgattcccatcaatcgccccaaacaacatgcgggtgtagtttagtggtaaaacctcagccttccaagctgatgtcgtgggttcgattcccatcacccgctccatttttatattgtcatgggcctgtagctcagctggttagagcgcacgcctgataagcgtgaggtcggtggttcgagtccactcaggcccaccatgatgatttttccacagtagctcagtggtagagctatcggctgttaaccgatcggtcgcaggttcgaatcctgcctgtggagccatacggagaagtactcaagtggctgaagaggcgcccctgctaagggtgtaggtcgtgtaagcggcgcgagggttcaaatccctccttctccgccataaggcccgttggtcaagcggttaagacaccgccctttcacggcggtaacacgggttcgaatcccgtacgggtcattaaaaaaaccttgcatactatgcaaggttttttattatgcgttcatagtgtaaatggtaaaagacaagtatgtggcaaaagcgctccataataaataaggaaccagaagccaggctgaagctttactgtatttaccggcaatgagcaacagaatgagtgtagtcacagccacaagcaggcaatcgatagatgcagcaagcaaatttttctgtgtgaattgaaaatagctgaatccttgattcacgatataattgatgagaagcatcacccaaaaagctttggattctttacatgaaaactttgcgtatatcaaggctgctgagagcgaaataagcgcaaacaaaaccgcccatatgatgccgatcactgatccgctcggcgtccagtcaggtttttgcagcgcgtcataccattcccggtcgatgggaaagagaacccccgctaaagaaaacaagacatatgtaatgataaatacaataatcgcaccgatatacttctttttcatttgttccctccgtcattcaatgtcaatacgttagttcccttttttggaaagattaaaccttttaaaaggtttatgcatcattaagtgtatgagttttcagtgtgaaaatgcagcaaaccatttatttgtattcaaaaaccccggcaggccggggttttaatcagcatgaagatcgccaaaggtcgtcataattccttcttcgtccagttcctgttcatatttttcgtgtgctttgcttggatacacggaaatgttttttccggtaatatctgtcgcgataaagttttcataatcctcagcatagccgatgttttcttctgagttcattgtcatatccccatagctgagcggaggatcttctaaatcctgaggcgtttctgagtttccgtattcctcaacatcctgataagcatcttcactatcgtaagccgcccggattgattcatcatcatcaaattcaaactgtccgaacggtgtttcctcttcaatcggcctgtctttggaaacggcatcctgcgaggaatattccgccaatgtcgtagccgtcggcagagcttcgagtctgtcataaggaatgtccttgccgctgacttcacatgtgccgtatgtgccgttttcaatttgcttcagagagtaatcaatatcgcgaaggtgctctcgttcatggtcgagcagagccaggtctttttcccgctcgtataattcggtcgcctgatcgccgggatgattgtcataggaagacaattcgccggatgactgatacgggaattcatcagttaactgaaattggtcattttctttaaagcggctcaaaatatcatgtctggcttcttctaattctttttttaagtgtgtaatctgttcgtttgtaagcacattaatccctcgtttctatgtgatacttactgttagtatgaacgcttttgcgcagaaaaatggtggataaaaatagtcattttcccatgaggaagtaaaagaatacagtgattgccgagagtggggaaagaaaattcaagtttgtttctttattcatttgcgcaaaaaggtttataataagaaatgcaggcattttgtcgtgctcaaatctgtgtgtttgacacaaagtcatcacaggtgtattgtattaaaagcatttaacggattatggaggaatgtctcatggtgacaacggtgcagcatacgttccgagaggaagcagatcatgcattacataaagccaaacaagtcaaccatgctgtcttattgagctattcaagacgtattgcgtctttagaccctctatcatttttcaaagacggagcaaaaaaatataaaggcaaacgatttttttggtcagaacccggtagcgaattaacaatagtcggtcttggcacagaagcgctgttccaatcgaatgaaaaaaatggaaagcgttatcacgacgtttttgaacaatgggagcgctttaaaaagacggcttttcatattcatgaagaagaagaggcggcgcataccgcggtcggccctgtcttattcggcggtttttcatttaatcccgctgaagagagaggagacgaatggaacgggttcgaagaaggactgttctttatcccctcactcatgctgacaaagacggcagatggtgattatttaaccgtcaatcaatgggcggcagacggtaatcaggcagaagatacgctgaaacgtctgaaatctttttcggaagctttttcagtttcttcaatcgagtatgaagaatatcctgttttaacaaaagcggaagaacttgatgtggaaaactggcttgaagccattaaaacagcaacaaatgatatgaaagcaaatcaatatgataaagtcgtgctggcaagggaagtcgttttgtcatatgatgggcctattccggcggagagcgttgtccgcaagcttttgacggaccaaacgacaagctatgtttttgcgattgagcagggagataaatgctttgtcggcgcttcaccggaacggctgatcaaaaaatccggcaaagacgtcatgtctacctgcctggcaggttctattaagcgcggagaaagtcaacaagaagatgaccgtctcggcaaagagctgctgcatgacgaaaaaaatctcgcggaacatgattttgtggttcagatgatacacgattctttcttgtcgagctgcagcgatgtgaaaaagcctgcaggtccgcaattatataaaacaaaaagtgttcagcatctatatacaccgatcacaggccatcttaaaacgtccgcttccctgtttgatttaattgaaaagctgcatcccacaccggcattgggcggagctccccagcagaaagctgttgaagttatcgctgatattgaaccgatgacacgcggatggtacgcggccccgatcggctggatggacggcagggaaaacggagaatttgtcgtggctatccgatcagggctgattgaaggcaaaagtgcgcggcttttcgcaggctgcggcattgttgaagattcagatccgcaatcagaatatgaagaaacacaaattaaactaaagccgatgatctctgctttaggaggtgaaaggctttgacaaacccgattacacattatatcggaagctttattgatgaattcgccctatcgggtgtcaccgacgcggttgtttgcccgggatcgaggtcaactcccttggcggttttggcggcggcccacccggatattcaagtccatatacagattgatgaacgatccgcaggttttttcgcactcggtcttgcaaaagcccgccagcgtccggtcatgctgatttgtacgtcaggaacggcggcggctaacttctatccggccgtgattgaagctcattattcaagagtgcctcttattgtcctgactgctgaccggcctcatgaattgagggaagtgggggcgcctcaggcgattaaccagcattttctgttcggtaactttgttaagtttttcacagactcggctctgcctgaggaaaatcctcaaatgctgagctatatcagaacattggccggcagagccgtaagtgaagccgggaagcgcccgatggggccggtccatatcaatgtgccgctcagagagcctttgatgccggatttatcagccgcaccttttgaaagaatgagaaaggggcggcacgtctcagtcacaacagggattcagtcagctgctcaagactctctctgtcatattacagagcgtctcgcgggtaccgaaagaggtatgatcgtctgcggcgaaatttacggtgaagcagaaaagcagcaaatcatcgcgcttgccgagatacttcagttcccgattttggctgatccgctttcaaatctccgaaacggggagcatgataagacgctgattattgatgcttatgactcgtttttaaaagatgaagaaataaaagaggcgctgcgtccggacgctgtgatccgcttcggcccgatgccggtttccaaaccgctctttttatggctcagagatgatcctgccattgagcagtttatcgtcgatgaagacggaggatggagagatcccacccaggccggcgcgcatatgattcattgccatccgtctgtgtttttggaagcggtccgttcagctgaaatcggaaaacggctgtccggatggcttgagaaatggcagtttgtcaatgagcggttccggagtcatttacaggccgcgagcatggatgatttatcatttgaaggaaatgtatatcgtcagcttcagcaccttgtccctgaaggcagttcgatttttgtcggcaacagcatgccgattcgcgacgtggatacgttctttgaaaaacaagatcgttccttccgtgtttatgccaaccgcggcgctaacggaattgacggagttgtctcctcggctatgggactgtgtgaaggtacaaaagctcctgtcacgcttgtcattggagatttatcgttttaccatgatttaaacgggctgttagcggctaaaaaacttggaattccgcttacggttattttaataaacaatgatggcggcgggattttctcgtttttgccgcaggcatctgataagactcattttgaagaactgttcggtacgccgacgggccttgatttccagcatgccgccgcactgtacggcgggacgtatacttgccctgagacatgggaggcatttaaggatgcgtatcagccgcaggcggacaagcccggacttcatataatcgagctgaaaacagatcggacatcaagagttcaattccatcgcgatctgctgcaggccgcagtgcgggaagtgaaaaaagaatggaaactgtaacagttaaaacggccgacggcgtatgctatcgtgctgctgatagcggacacgaatcatccgaagctattgtttgtctgcatggatttacgggcagcaaagaatcatggatgtttttacgcggcatgtttcccggcgaacgaatggtgatgattgactgcctgggtcacggggagacagacgcgcctgtgcaagcggcaaggtacagtgcgagccggcaggttgcggaccttgccgccgtttttgatcaattaaaacttcacaaagtgaaacttattggttattctatggggggaagacttgcgtattcctttgcacaggcatttccgcatcgggtgtcagcgcttgttttggaaagtacaaccccgggcctcagcacgcttcaggaacgtaaaaagcggattcagtcagaccggaagcttgctgactttatattgcgggaaggtataacatcttttgttgattattgggagggcattccgttgtttgccacgcagctttctctgtcggacagcgtaaaggcgtccatccgtgccggcaggctgaaaaataatccgtccggacttgcaggcagcctgctcggaatggggacgggctcacagccttcctggtgggaggcattacaccacatcaaggcgcccgttctgctcatatgcggagaatgggatgaaaagttttgcgttattaatcaaaaggtgcataacctgctcccatcaagtaaaatagaggttgtcaaacaggcggggcacacggtacatgtggaacagccgcgaatttttggtaagatagtaagtgagtttttatacggcttgtaaagcataaagaaaatagcttttcggccggactcaggcaaaaatgaaggaggtcatatcaatggctgcagaatggaaaagtgaacgtcagtacgatgaaatcctgtacgagacgtataacggtattgcaaaaataacaattaaccgcccggaggtacataacgcatttactcctaagacggtatcagaaatgattgacgcgtttgctcgtgcgcgtgatgactccaatattggtgtcatcgttcttgcgggagcgggagataaagcattctgttcaggcggagaccaaaaagtccgcggtcacggcggatatgtcggagacgatcagatcccgcgtctgaatgtgcttgatcttcagcgtttgatccgtgttattcctaaaccggtcgtagcgatggtatcaggctatgccatcggcggaggccatgtgcttcatgtcgtctgtgatttaacgattgcggccgataacgcgattttcggccaaaccggaccgaaagtgggaagctttgatgcaggttacggctcaggttacctggcacgtatcgtcggacataagaaagcccgtgaaatctggtacttgtgccgtcaatacaacgcgcaggaagcgctcgacatggggcttgtcaatacagttgtcccattagagaaacttgaagaggaaacaattaaatggtgtgaagaaatgcttgagaaaagccctacagcccttcgtttccttaaagcggcatttaacgctgatacagacggcctcgccggaattcagcaatttgcaggagatgcaacgcttctttattacacgactgacgaagcgaaagaaggccgcgattcctttaaagagaaacgcagtcccgatttcggtcaattccctcgttttccgtgatcagatgacactacgaaacagcttgagccgctctggtccaagctgttttcttttcaaaaacagtacttttacctcggagatgataacatgctgacagaacagccgaattggctcattcaaagggctcagctgacaccagagagaatcgctctcatatttgaaaacaaacagatgacattcagagaattatatcatgcttctaaacaaatggccgcgcggctgtccaaatactgctcgcttaaaaaaggagaccgggccgcgattttgctttctaacagaccggaaatggtttatgccgttcacgcctgtttcttattaggggcggaagctgtgctgttgaatacgaagctctcaaaacaggaacggatgtttcagctcaaagattcacaggctaagcttttattgacggaggacggtttttgccgtgaagaatatgaatctgcggtcgccaccgcggacgtggacgagctgcaggccaaagccgcgggagacattgaacctgaagcttatgtaacgcttgatgatacggcgactcttatgtatacgtcaggaacaacgggaaggccgaagggggtgcagcagactttcggtaatcattattccagcgctgtatcgtctgcgctgaatctgggggtcacggagcgggaccgctggcttattgcgctgccgctgtttcatatcagcggtctgtctgcgctgtttaagtcggtcatttacggcatgcctgtcgtgcttcatcaaaaattttctgtcactgatgtgctggacagcatcagctcccatcaggtcacgatcatttcagcggtgcagaccatgctttcgggcctgcttgcggaaactgaacaatgtcctgaatcactgcgctgcattctgcttggcgggggtccggcaccgctgccgctccttgaagaatgccgcaggaaacaatttccggtattccaatcttacggcttgactgaaacctgctcacagattgtcacgctttctccggaattcagcatggacaagctcggctcggccggtaaaccgctgttttcatgcgaaattagaattgaaaaagacggaaacccttgtgcgccgtttgaacatggtgaaattacggtgaaaggcccgaatgtaatgaaagggtattaccatcgtgatgacgcaaaccaggccgcttttcataatggatggtttaaaacgggcgatcttggatatttggatgatgaagggtttttatacgtgctggacaggcggtcggacctcattatttcaggcggagagaacatctacccggcagaagtggaagcggcgctgcttgcccatccggctgtagcggaggccggtgtttcgggagccgaagatccgaagtgggggaaagtgccgcatgcttttctcgtgctgacttcttctgtcagttctgaggagctgaccgccttttgccgtgagcggcttgcaaaatataaaataccggctgcttttttcgaggttgacggactcccgcggaacgcgtccaataaactgatgaggcatcggctgaatgagcttcgtaaaggagaattgtcatgattaagattgaaaaaatcaccctttatcatgtaagtatgaggctgaaaaaaccgtttaaaacaagtattgaaacgctgcaggatcgtaaatttttgatcgtggaagcgatcgatgaaaccgggagaaccggctggggggaggtatcggcgttttcttctccgtggtatacagaagaaacgattcagacatgcgcgcatatgctgagagattttttcatcccaaatgtcgtaggccgcgagtttttccatccgtcagaagtgcctgacagtctcgcgcgtttcaaaggaaaccgcatggcaaaagcggggcttgaatcagccgtgtgggatctatatgccaagaaaaaggggatatctctcgcagaagccttagggggcaaaagagataaagtgcccgccggcgtggcggtgggtctggcttcggctgatgagatgcttcgggaaattgagcaatacgtaaaagaaggttatcaacgtataaaaataaaaattcagcccggccatgacgttgatctggtcagatccatccgcagccgttttccgaacgtaccgctgatggcggatgccaactcggcatatgaactgaaagacatcagcaggctgaaagagttggatgaattccagctcatgatgatagaacagccgcttcaggcagatgatattgtcgatcaccgccacctgcagaaacacttgagaaccgcggtatgccttgatgaaagcatatgctcatatgatgacgcgaggcgggcgattgagcttgggagctgtaaaatcattaacataaaaccggcgcgtgtaggaggcctgacagaggctttaaaaatacatgacttatgcagagagcatcacatgccggtttggtgcggcggaatgtttgaaaccggcatttcgagagcgcagacagtcgcgcttgcttcgctgccgcaatttacgataccgggtgatatttcctcatcagaccgatactgggaggaggatattgtcactcccgacatacgtatcgaagagggattcatctctgttccggacggccccggactgggtgttgaagtcaatcaggaaataatgagaaaatacgtcacccaaatggacgtttttacgacaaacaattgataaaaagacatttcagcgagttgagctgcctgtatgctgctgttatattgaaactgttcatcatcaccccttcccccgtttgaaccggctgtatcagccggtttttttaatgggcgaatgcgatgatttttttattcttcaaacagtgtcggctttacatcgcaggtgttgctttctggctggggcaaacatgtacatcttgataaaaaattctgtgcttgtcatgaatgcgatactgatcgtaccgtctgccgcctatactgacaaaccgcctttcttccatgcttttcatcagcgcgattttccccggctcaggggctgatttcaaaaaggcttgcggcgcggaaatgaaaaagagctgtataaaacagctcttttcttttataaatcatgcggtttaaaggttttgcaatccgtttcttcacttttttcagcggtttcgcctgtatggctgaccacataaatcgcgtcggccgtgcatttgtttcctctgccccaatatgaacagttattgacttcacacagaattttttggtccatgctggctcccctccaagataaaaggtacgccattagtatgagccgccctgatttttgttattcctcctggcggatataacgtctgtctttcataaagagcttccagaagaaataaaacccgggaaacaaaatgatgaaagcgacgatatacgtcataaacagcgccctgaaggtggccggctccgtaaatcctgacatgaccgtaatatcaggataaatcatataaggaagatgcgcccgtccgtatgcatagcttgccagaaagtattgaagcgcaatggcgatcatggcgattcttggtttgccgaggttgcggccgaagcgtttattcggcaaaaacagggccgcgccggcaatgaaaaacatgataacagacaggataagccatgtcttgtctttcatcatccccgtatacagccagccggcttcgtttcgtaatgtcagcataatgaagaaggcaaatagaagcgaaagcggccctgttagtaaagaactccgtctgtagatgcggtacgcatgctcctcttccgcaacatttgaaaaatcggccagaagcagtgaagataaaaataaagtgcttaaaatggcaaagccgataaacgcatacgcattaaggcttgtaaagacatttgccaaattcagttgatacactccgcccgtcttctcaataaatcctccgtgtgtgaccggaaggaccaaaatcagcacagcgggaataatgaagcccgaaattccggagatatatctcatgatttttctttccttcgccgtattggagaagacgagaaagccgctgcggatggctaaaagcagcaaaataatactccccgggatcaataaaacggttcccagcacgaaggttgcccctggaaagaagctgaatagggcgacaacgattgcgacgataaagacgttggtcacttcccatgtcggggacaaataacggttggcgatgtttgtcgcctttgtttgttctttatttaaataaatcatcgaccaaaagccggctccgaagtccatcgttgccatgaccgcgtagataaacacgaagccccatacgattgatatcgcaatgagagcatccatggtaatgtccattttaattcagccctttctatagttaggattccgccgcttttacatcctcctcaacgggatgtttgcggaaataataaagcagcacataaatgactgcggctgccaaaatggcgtaaacgaccgtaaacaggatgaacagcaaaccgattgaaccggttgtcgtgacgacatcagacgttttcaagagatggtaaatcacccatggctgccgccccgtacaagcgaatatccacccgaattcaattccgatcagactgagcggtcctgcggttaaaaataaaatcaaaagccaagtcggaaagctgtctttctttaaaatttttctccacacgatgccgatgattgagtacaaaatgagcagcattccaatgccgaccattccgttaaacagtgtatggatgaataaaggcggccactcgtctttcggaaacgcgttcaatcctttgacgacggtatcaaagctgtttgcagccaaaaagcttaaagcccatggcacttctatcgcccattttactttttcttcttttgcatcagtaaaacccccgatcgcaagcggagcgtgtgatctagtttcaaagagcccttctgcgcccgcaagcttctcaggctggtattcgtaaagaagctgggctgactcgtgaccgtttaaagaggcaagaatggaaaagattccgccgatcgttaaggcgagcagcagcgcttttcggtgaaagcggtatacctgctcctgttttctcgttctcagcattttataagccgcaactgacgcaacgataaatgccccggtcatgaaagccgtcagaacgacatggcccgcggtggtgaaaaagcttggattaaaaaacgctgcccaaggttcgacgtcagtgattttgccgtttaaaattttaaagccggccggcgttccttcaaatgcgtgaacatttgtgattaagacggcggatgccgcggcgccgatcaaaacgaaaattacggcaatgatgcgcatcgccggagtcagccggtcagcggcgtagacataaattgacataaacagcgcttcgataaagaatgcataaatttcaatctgaaacgggagggacatcaccctgccgatgacttccataaatccgggccacaaaagggcaagctgtgtacccgcgatcgttccggtcggtatcgccacgccgagcagaacagcctgcgccttcgtccaccttttcgccataatggcataatgcggatcttttgttttttgataaatcaattcagccattaaaatcatcagaggcaagccgacaccaagcgtcgcaaaaataatatgaaagcccatggttgtcccgaacaggcttctggctaatactaaatcatccacgatcataaaccgcctttctaaattaccgttttatgtaatgtggttatattatttgctgaagcgattagattattcttccgattccatatatgtgcagggtttagaaatcaagggatcagggcatatatgattgacaagcggttatttaaggtttaaaataaaacgtaataattacgatttgagaaagggagatcagcatgaaaaaagatattcatccggataaccatcaagtgatttttcaagatgtgaacagcggctatcgctttttaagccattctacgaaaacgtcagcggaaacggcagagtgggaagacggaaaaacatacccgctgattaaagtagaagtcagctcagatacgcatccgttttatacaggccgccaaaagttcaacgaaaaaggcgggagagtcgaacagttcaacaaaaaatacaatatgggaaaataagacaagcccaatggggtttgtcttatttattgagcactttgtcatctcgtgcggggagtgacgaaatgacccgtcttatgttatattgtgaataaaaaagcagaaaggaaacaccaagatgagtcttctaaacgatatcatgcaatttaatgagcagttcactaaaaacaaagattatgaaaaataccaaacatctaaattcccggataaaaaaatggcgattttgtcctgtatggacacacgtcttgtagaattgcttccgcatgcgatgaatatgcgaaacggcgatgtgaaaattattaaaagtgccggcgcgcttgtcgcccacccgttcggaagtatcatgcgcagccttttagtggccgtatacgaattaaacgccgatgaagtctgcgttatcggccaccatgattgcggcatgagcaaaatcaacagcgaggatatgctcgataaaattatcgaccgcggtattccgaaagagcggattgacatgctgaagcactcaggagttgatcttgatcaatggctgaaaagctttgattcagtagaagcgagtgttacagacagcgtaaacgtcattaaacaccatccgctattccctgacaatgtgccggtgcacggtctggtgattgatcctgaaaccggtaaacttgatctggtgatcgacggctaccagcatatggactaatgtttttgttttttgtccggtacgggatcaacaccgcccggatgaaaagggtggcactttaaaatccgcttcagtgtcagccatccgccttttaatgcgccgtgagtcttgacggcttcgattccgtactgcgaacacgtcggataaaagcggcatgacggcggcgtcagcggagagatgaacttctggtatccgcgaattaaagcaatcattatggttttcatcaaaaaaaccacctttctgatgctagtatagaaaaaaaatttcagattgaaaagcttccgcctcaattcttatcggaaaactgtgttataatggatgcatattctgaaaaaagggagtgccattatgccttcagtagaaagttttgagcttgaccataatgcggttgtggctccgtatgtaagacattgcggagtgcataaagtcggaacagacggcgtcgtgaataagtttgacattcgcttctgccagccgaacaaacaggcgatgaagccggatacgattcatacgcttgagcacttgcttgcgtttacgattcgcacacattctgagaaatacgatcacttcgacatcatagatatctcaccgatgggctgccagacaggctattatcttgttgtcagcggcgagccgacagcggaagaaattgtagacctgcttgacgctacgctgaaagaagccatcgatattacggagattccggcggccaacgaaaaacagtgcggccaggcgaaacttcatgatttagaaggcgcgaaacgtctgatgcgtttctggctgtcacaagataaagaagatttgctgaaagtgttcggataaaaaacaggcctttttgctgacatgcaaaaaggcttttttacatatttctaaaaaatgtcacaccttatgtgtaagcgtttgctaaaatagaagcaaacatgaaggagtgatgggatgaaacgggctgtattggcaggtatgtgcggtatggtatttctattatcttcctgcgggggcaattcggacaaaacctccgcggatgaagagcctaaagcgcttgaggtcaagcttacaggaccggaaacggcagcaccgcatgaaaaagcggaatacaaggcggaagttttttacggcggcaagcgtgtcacggatgcggatgaagtcatgtttgaagtatggaaagaaggaaaaaaaggcagcagcaaaacaagcaaggccaaggaggaaaaaggggcgtatcacctgcggactgaatttgatgaagagggtgtgtataccgttcaatcccacgtaacggcaaaacagcagcataatatgccgactgtaaaagtgcgtgtcgggaatgctgaagctgccgatgattcctccggccatgaggaacagacgcatcatcattaaggattttttttatccgtcaagccttttgatgcgtcctccggcgggtcaatcgtatgttttacattataagctcttacagtcgaccagatggataaaagcagcacggcgagcacgataagaaagccgaagctcagaagaagcagcatgaaatccctcctttttaacaaatcataacatattttccatccgtaaaatcaagggctaaaaatttatgttttaacacacgatatatagggtatatcaatagtaaaccaaaggaggaagataggcatgtcagaaaaactattggatgcagtcaataagcaagttgcaaactggacggtcatgtacgtgaaattacataactatcattggtacgtcaaagggaaggactttttcacattgcatgaaaagttcgaggagctgtataacgaaacggctacatatattgatgatctggcagaacgtctgctggcattaaacggcaagccgatcggcacaatgacggaatcattgaagacagcgtctgtaaaagaagcggaaggcaatgagagcgcagaacaaatggtacagaacatttatgatgatttcactgtcattgcggaagagctgaaaagcggcatggatctcgcagatgaggtaggagacgaaacgaccggtgatatgctgcttgccattcaccagaatatcgaaaaacataactggatgctgaaagcgtatttgggataatcaacaagggaagaccggggctataaagcactcggtcttttatttggctgccgaagagaggtgttgtccatttttctgaaaaatccagtccgttccattcacttttcatagaataatgtaaggccgtttctgtgaaaggatgttggatcaagtgggcaaagactttggcatcttttcgttttttgcagtgatcgtgtcggcagcggggtttttcttcggaggttttcagtattcgtttctgattttgctatcggtcatggcgattgagtttatcagtacaagcttaaaagaatctcttttgcagcagctgagcgcaagaaagctttttgcgcggctggtcaaaaaaatcgtgaccctggcattagtctcagtttgccatttttttgaccagctgcttcataccgaaggcgccatccgtaatttggctatcatgttttatatcttatacgaatcggttcagatcgtgattacggcaagctcgctgggcataccggttccgcaggtgctcgtcgacctattggatactttgaaaaataaattcaagcgcaaaccgtaacatttgcttcaaaggaggctatactagcgggtatgatggttttcctctgaatttttgataaagggcttccgaacaaacgcaactgtggtatgatgtatggaagatatgaaggaacggattagagggataaacatgtacgagtttaaagactattatcagaacactgttcagctctcctttgaacaccagcctttttcagacagcccgaagcacgtatgggtcatatgccgatatggagataagtggcttttgactgagcacgaagaccgggggtttgaatttccgggcggaaaagtggagccgatggaatgtgcggaggaagcggccctgcgcgaggtgaaagaagaaaccggcgccgcggtaagacatctgaagtacgtcggacagtataaagttctcggcagggaaaaggtaatcgtgaagaatatttattttgccgatattgaaaagcttgaacaacaggctgactattttgaaacaaaggggccggtgctgttcagcgaactgccggagaatctcccgcgaaataaaaaattcagtttcattatgaaagattcggtgcttccgatcagtctgaaaaagctgaaagaggacggcgtatttcaatcataaaaacgaagacccggcgtttacgcacgggtcttttttaaatttttcctttcgtccattttctttctaacagttcgactccctgatacatcaatgtcgcaaaaatcgcgatgatcagaaggcttaagaacacaagagtgaaattgaagacctggaatccgtaaatgatcatgtagcccagacctttttcggaaacgagaaactcgccgacgatgacaccgacccaggataaaccgacgttcactttaagcgcggaaatgatcgcgggggagcatgccggcagaatgacttctttaaacatgatgcttcttttcgctccgaaggttttcatcactttaatatagttttcatccacttcctgaaaagccgtaaagacgacgattgtcgtgataatgacactgatgactgctcccatggcgacaatgcttgtgaaattcggtccgagtgccacgatgagaatcggtccgagtgcgaccttcggcatcgcgtttaaaatgacgaggtacgggtctaaaacccgggcgagcctgtttgaccaccataacagagcggcgaggcatgtgccgaggagcgtgccgagcaaaaagccgagaacggtttctcctaaggttacgccgatgtgcgccgcaagggatccgtccgcaatcttttcaactaaaagcctgcaaacggcggagggtgagctgaagattaacggatcgatccagcccgccctgctcgatatttcccagccggcaaaaaatacgatgaaaatggcggcctgatacgcacggatccggagcttttctttttggtgtcttttcttaaactgctgatgaagctgttcaatcgtgccgctgctgtttttcaagggaattcagctccttccatatggtttgaaacagcggctgaaaggccggatcctgacgcgcgtcaaacggatctaaagccgcgagctccttaggcacggtgaatatttggtggatggtgcccggctgattcgaaaataaatagatcgtatcgctcatggcgatggcttcaccgatatcgtgggtgacgagcacggcggttttttgaaaatcctttaatgttctgaagacaagattttccaaagaaagcttcgtttgaaagtccagcgcggaaaacggttcatcaaggagcagcagtcccgggtccggcgcaagagttctggcaagtgccgcccgctgccgcatcccgcctgacagctctttcgggtatttcttttcaacgccgattaatccgagcttaggcagaaggctgagaacttcagctcttttttcttctgttaatgtttttgaaatgtgtaaaccgagcagcacgttttcctcaattgatttccaaggaaataaataatcctgctgaagcatataaccgatttggtgttctttatggttcggcacacttccttcaatcagcacccggccttgcgcaggagtaataaggccggccagaatggacaggagtgttgtttttccgcatccgctcggtccgagaaaggagatgaaatcccctttttcaatctgaaaatgtatatctttcacggcggttgtcttttctttcagcgagaaataagtatgtgttacatgatccacatgtaaaaaagacattcatgttcctcctattgttctgaggtgacttttttggcgatttttgtgttgacgagtttgctgtacggaatgtgtttcgggagctctccggcttcatccataatagattgaagctgttcccattcatccttttgcagaactgggtctgaagagaatgacttttgttttttatatcgctctattgatgtttcgataatggccggatcggtatcggcaaattccttctgaatcgtttttgcgatgtctttggccggatggctttccacccattgctgggcgcgatagatggcgcgggtgaatttttccgccgtcttttcattggttttcaaataactttcttttgccataaaggttgtgtatggcatttggccggaagcttctccgaaggatgcgacgatatggccgatgccttctttttcaaattgggatgccgtcggttcaaacagctgcacataatcacccgttccggatgcgaatgcgttggaaatattggcgaaatcaatgttttgaacgaggttaatgtcttttttcggctctatgtgattctttttcaggacgtactcaccggccatttggggcatgccgccttttcgctggccgagaaatgtttttccttttaaatcgttccatttgaatgatttctcatccttccgtgacacgagaaatgtgccgtccgtctgtgtcagctgtgcgaagttgatgaccggatcttttgctccctgcgcctccacgtaaatggatgtttcagaaccgaccagcgcgatatcagacccgtttgataaaagcgatgtcattgttttgtctccgccccatgttgtttgaagtgacacttggagcccttcttttttaaagaaaccttttgcttcagcgacatacagaggcgtatagaagatggagtgtgtgacttccgccacctttacctttgtcagactttcttcctgtctgcaagccggaagaatgagcaggaaaaaggcgcatatgacaaaaacgcagcccgttttgagccatttgttcacggtgtaacctccttgttttaagcgttaaaataaccttttctgctttacatatcgtatgatgggtataaaaaatgtgtgagtgcccatattcacgttgggaaagaataaaaaaactgatgatataaggaggctcattgttttgctggtagaaaagaaaaggttcccgtctccgagtccgcatgtccgcctctttgcggtgtgctatgagtcagaaggactgaaggtaaaggggctccttgccgagcctgcggcgccgggaacatatgacggttttttatatttgcgcggcggcataaaaaatgtcggcatggtacgccccggaagagtcgttcaatttgcttcccaaggctttgtcgtgtttgcgccttattacagaggcaaccagggcggcgagggaaatgaagattttgcgggagaggacagagaggacgcgttttccgctttccgcctgcttcgggagcatccgaacgtcagggaagggcgggtgcatattttcggtttttcccggggcggtatcatggggcttttgaccgcgattgaaatggggcatcaagcggcttcgctcgtatcatggggcggtgtgagcgatatggtgcttacttatgaagagcggaaggatatgcggcggatgatgaagcgggtgatcgggggcacgccgaaaaaggtgccggatgaatacagatggcgttcgccgtttgaaaaagcagaccgcattcaggcccctgtgctgctcatccatggagagaatgatgagaatgtttcgatcgaacacgcccgaatgatcgaggacaagctgaaagaggcggggaaaccggtggaaacttggtattacagcggttttacgcattattttccgccgcaggaaaacagacgcattgtccggcggctggcggaatggatgaagacacggtaagatgcctgatttatgatatgataataaagaataagagaatgaaaggggattttcattttgggaatgcctgttgaatttaataccatgattgtgacaaaaggcaatgaaaaaaggatagaggaaaatatctttttattggagaaagagggctaccgcgtctatcctcttgatattccgatggacgtgcgcaaaacgaaaaccggcgagaaatccggcaccggcgaggtccagaagctcgaatgggcgaacggccggacaagcattacatacagactcacgtcgcttcattcgacaaactgaaaaaacaaaagccgagggcataaacgcccttggcttttttgattacacgagaggtccgccggctttggcaatcgagtccgcatgggaaaactttttaaagttttctttaaactcattggctaaaaacagcgctttttcgttgtatgcctgtttatcgctccacgtgttttcaggctgaagaacttcatccggcacgcccggaacatgaacgggactgcgcaggccgaaaatgctgtctgccgtcatgtcagtctggttcagtctgccttcaatagcggccttgaccatcgctcttgtatacgaaagtttcatccgttctccgactccgtaccctccgccggtccagcctgtgttgaccaagaagacttgaacgccgtgttcatcgattttatgcccgagcatttcggcatatacatgcgccggaagcggaaggaacggtgaaccgaagcacgtcgagaaagtcgtttgcggagatgtcacgccgcgctcggttcccgcgagtttactggtgtacccgcttaagaagtgatacatcgcctgttccttcgtcagtttgctgatcggaggaagcacgccgaatgcgtccgccgttaaaaagacgatcgcctgcggatggccggcaatgctcggctgcacgatattgccgatcatctcaatcggatatgcggctcttgtgttttccgtgtagaaggaattgccgtaatcagcttcacccgttttttcatcaagcacgacattctcaagaacagacccgaagcggatcgcacgaaaaatctgcggttctttttcctcgctcagattgatacatttagcgtaacatccgccttcaatgttgaaaacgccggaatctgaccagccgtgctcgtcatcgccgatcagtttgcggtccgcatcggctgaaagcgtcgttttccctgtgccggaaaggccgaaaaacagggcgacatcgcctttttcaccgacattggctgagcagtgcatcggcagtatatcctgctgcggaagcaggaagttcataatggagaatattgattttttcatttctccggcgtattcggtgcctccgattaaaatgacgcgcttttcgaaagagacaatgataaatgtttccgaatgcgtgccgtccgtctccggatctgctttaaaatgcggagctgagagaatggtgaaaggctgcgcttgcctgtctctttcatccgtctccggtctgataaacagctggcgcgcgaataaattgtgccacgcaaattcatttacgaccgtaatcgggagtctgtatttttcatccgctcccgcgaatccttcaaacacaaacagttcatcccgctgttttaagtagctgacgactttggcgtacagcttttcaaatgcctcttcagaaatgggctgattcaccgcgccccaatcaatttgattttctgtgctttgttcacggacgataaatttatctttaggtgaccggcctgtatatgcgccggtggtggcgcgtacggcgcccgttgatgtcagcgttccttcatttcggctgatcactttttcggtaagttttggagccgataaattatgatgcacattcggacttgcaagtaatgcttgaagatctgcggttaaatcaactaatttcataaaaaccttcctttgccggtttatttgtatttcgctgaatgtggaattagtataacatatatctgaaaatagtctatactatttgcggttttttgtttgtgtttttccattgcttcccgaaataaaggcgcgtaatcgctttaattcatattgacactttccgcccttttacgataagatatttcattgagcggatactcttatcccgagctggcggagggacaggcccgatgaagcccagcaaccggtttctctgtaaaaaagcaggtgaaaacactgtgggaaaccaaggtgctaacctgatgcaaggtttaatattttccttgagcgataagagtgaaaggcacacagaccaaaccctttcctcgagtggaaaaggtttttttatttcataaaatatgccaattaacattctctgatatagtatgacattgtattaagagggagcgagttccgtatcatatgaaaaggtcttgcaaaagatcttttttcaggaggaaaagtgaatgagtaaaaaccgtcgactatttacatctgaatctgttactgagggtcatccggacaaaatctgtgaccaaatttctgacagtatcttagatgagattttaaaaaatgacccgaacgcgcgcgtagcctgcgaaacatctgtaacgacaggacttgtgctggtaagcggagagattactacatcaacatacgttgacattccgaaaacagtccgtgaaacgattaaagaaatcggctacacacgcgccaaatatggatttgatgcggagacttgcgctgttttaacatcaattgatgaacagtctgcggatatcgcaatgggtgtcgatcaggctcttgaagcgcgtgaaggcacaatgagcgatgctgaaatcgaagcaatcggagcgggagaccaaggcctgatgttcggttatgcgtgtaacgaaacgaaagagcttatgccgcttccgatctctttggcgcataaattagcccgccgtttgagcgaagtccgcaaagaagacattcttccgtaccttcgccctgacggcaaaacgcaagttaccgttgaatatgatgaaaacaacaagccggtccgcatcgacgcgatcgtcatttcaactcagcaccacccggaaattacgcttgagcagattcagcgcaatctgaaagagcatgtcattaatcctgtcgtgcctgaggaactgatcgatgaagaaacaaaatacttcatcaaccctacgggacgtttcgtaatcggcggacctcaaggtgatgcgggtctgaccggccgtaaaatcatcgttgacacatacggcggatatgcacgccacggcggcggcgcattctccggtaaggatgcgacgaaggtagaccgttctgcggcatacgctgcgagatacgtagcgaaaaacatcgtggcagcaggtcttgctgattcttgtgaagtgcagcttgcatacgcaatcggcgtggcacagcctgtttctatttctatcaatacatttgatacaggaaaagcttctgaagaaaaactgatcgaagtcgtacggaataacttcgacctgagacctgccggcattattaaaatgcttgatctgcgccgcccgatctataagcagacagctgcttacggccacttcggacgtcatgatgtggaccttccttgggagcgtactgacaaggcggatgcgcttcgcaaagaagcactaggagaataattttatagccgcttacttaagcggctttccctttttgtagatgctgccatgcttattttttacatagcgtgaaaccaatggcgtaacaaagcgtctataaaaagggggtccaattagaaaattacacttatggaggctatactatgtgtggatttgtcggtgtttttaataagcatccattaactcaaaccgcagatcaagaagagctaatcaaacaaatgaaccaaatgatcgttcaccgcggtcctgacagcgatgggtattatcatgacgagcacgtcggattcggcttcagacggctcagtattattgacgtagaaaacggcggacagcctttatcatatgaagacgaaaaatattggatcatttttaacggcgaaatctataactacattgaattgagagaagagcttgaagcgaaaggctacactttcaatacagattccgataccgaagtgctccttgcgacataccgtcattataaagaagaagctgcttcaaagcttcgcggaatgtttgcgtttttaatctggaacaaagctgaccgcgtcatgtacggcgcgagagacccgttcggcattaaaccgctgtattacacaaccatcggggacaaagtatattttgcatctgaaagaaaaagtttaatggccgctcaaaacggcattgatcttgatacagcttctttacagcaatatatgtctttccaattcgttcctgaaccgagcacgcttgacgctgaagtgaaaaaagtcgagccgggcagccagtttacgatccgcccggaaggcgacatcgcgtttaaaacatatttcaaagcgaacttcaagcctgttcagtctgatgaagataaattggtgaaagaagtcagagacgcaatctttgactctgtcaaagtccacatgagaagtgacgtgcctgtcggttcgtttctatccggcggtatcgactcttcttttatcgtctcagttgcgaaagaatttcacccgagccttaaaacattttccgtcggttttgagcagcagggcttcagtgaggttgacgtagcgaaggaaacggctgccgcgctcggaattgaaaacatcagcaaagtcatttctcctgaggagtatatgaacgagcttccgaaaatcgtctggcactttgatgacccgcttgcagatccggcggcgattcctttgtactttgtcgcgaaagaagcgaaaaaacatgtaacggtcgcgttatccggggaaggcgcggacgagctgttcggcgggtacaatatttaccgcgaaccgctatcgcttaaaccgtttgaacgcattccgtccggtctgaaaaaaatgcttcttcatgtggcgtccgtcatgcctgaaggaatgagagggaaaagcctcttagtccgcggctgcacaccgcttgaggagcgttatatcggtaatgcgaagatttttgaagagcccgtgaaaaaacagctgctcaaacattacaatccagagctttcataccgtgatgtcacgaagccgtactttacggaaagccgttcatacagcgacattaataaaatgcagtatgttgacatccatacgtggatgcgcggcgacatcctgttaaaggctgataaaatgacgatggccaactcattggaactgcgcgtgccgttccttgataaagtcgtgtttgacgtggcttctaaaattccggatgaactgaaaacgaaaaacggcacgacgaaataccttctgcgcaaagctgctgaaggggtagtgcctgatcatgtgcttaaccgcaaaaaactcggcttccctgtgccgatccgccactggctgaaaaatgaaatgaacgaatgggttcgcaacatcattcgtgaaagtgaaacagatgcttatattgaaaaggattatgtccttcagcttctggaagatcattgtgccgacagagcggacaacagccgcaaaatctggaccgtgctgatcttcatgatctggcacagcatcaatgttgaaaaaagactggtgccggaagagctgaatcatcagccgaaagaagtcattttcgtttaatccaaaaggctttcgatgttatcgaaagccttttttctattgtttttttgtaaaccgtctattccgctctgttttcgacaaagtattacgcaatattcagaaaaaggttataataggactaatcgggtagattccggaaagtgttttctggctatttcgtctcggtttgtgtttctttgtcaaaatcagggggagggagagttatgcaaaacaaagaaaaaacgcttcaccgcggcttggaagagcggcatatctcgcttatgtcgttgggcgccgcgataggagtcgggctgtttctcgggtcggcttctgccataaagcttgccgggccggggattttagccgcctacgcctgcagcgggctgattatgttttttattatgcgggcattaggggaaatggcgattcaaaagcctgtagccggctcattcagccggtatgccagagattatctcggtccgcttgccgggtttttaacaggctggaattattggtttttatgggttgttacctgcatggcggaaatcaccgcggtcggcatttatatgggctactggttccctgacgtgccgtcatggatatgggcgctttgtgcactcgtcattatgacggctgtcaattttctggcggtcaaagcgtacggtgagcttgaattctggtttgcgctcattaaagtcttggcgattctgtcaatgatcgcgatcggtctggtgatgatcgtattcggtctcggaaacggaggcgttgcgctcggaatcagcaatttatggagccacggcggctttttcccgaatgggattaaaggggtgctgctatcgcttcaaatggtcatgtttgcctatctcgggattgagctgatcggtgtcacagccggtgaggtcaaaaatccggaaaaatcactggcgcgggccatagatactgttttttggcgcattctcattttttacgtcggagctttgtttgtcattatgtcaatttatccgtggcaggaaatcggttcaggcggaagcccgtttgttttgacatttgaaaaaatcggaatacccgctgcagccggaatcattaattttgtcgtattgacggcggctctttcttcctgcaacagcgggatcttcagcacggggcgcatgctgttcaatctggcggaacaaaatgaagcgcctaaagcatacggtacggtcacaaaaggcggtgtgccgggaaaagcggtattggtttcagcgggcgcgttatgcatcggcgttttgctgaactacgtggtgccggcgaaagtgtttacgtgggtgacgagcattgcgacgttcggagcgatttggacatggtcgattattttgctttcccaaatgaaataccggaaaagcttacagccggaacaacggaaaaaactgaaatataaaatgcctttataccccttttcctcatatatctcgctggcatttctcgcttttgtcgttgtgctgatggcttttaatgcagagacccgggtggccgtcatcatcgggcctgtctggttcggcatattattagccgcctattacgggaaaggtttccataaaagaaaagacataggtctggaaaacggacagacattcgccgaaaaagcgtaaaaaaaagagcccgggacatgggctctttttttcataggatcgggccggcggggaaagaataaaacaaattcctgaacattttgcttctgtttcctgacaatcgggagaatgcaaatggtttttacttaaataatattttgaaaaatggtacagtagtaaaacaaagctgatctatttttatttctcttgcagtgttttatagtatcggcctttttcaacatattccgttctgattctttccatgtcccgtatgtcttcttctgtcagccggcggataacctttgcgggccggccgaacgcaagacagccgggaggaatggttttgcccggaggaacgagacttccggcgccgataaacgcgccttctccgatttccgccccgtcaagaatgacggagcccataccgattaaagcattctttttgatgattgcgctgtgcagtgtaacctgatggccgatcgtgacgtcatcttcaataagaagcgggcggttcggactttgatgcagacagctcaagtcttgtatgctgactctttttccgattcttgtcggcgcaacatccccccggatgacggctgagaaccaaatgcttgattgttctccgatcacgacgtcgcccgtaatgacggcgttatccgcaatgaacgcttcaggatgtatgtcaggcgtaaattgtttataagggtagattatcatgtctcatccttctttctctaaatttatgtaagaggtgaactgcatgtggacttggaaagcagacaggcccgttggtaccattgtcattatccacggggcaagcgaataccacggacgttataaatggctcgttgaaatgtggagatcttccggatataacgtggtgatgggtgatttgcccggtcagggaacgtcgacccgcgccagagggcatattcgctctttccaagaatacattgatgaagtagatatatggattgataaagcgagaacgcttgaagcgcccgttttccttttgggccacagcatgggcggactgattgcgatagaatggtttaagcagcagagaaatccccgcattacggcactcattttatcatcaccttgtctgggtctgcaaataaaagtcaataaagtccttgattttgcgtctaaaggactgaacgtcctcgctccgtccctcagagtggattccggcttatcacctgatatggcaacgaggaatgcggatatgattgaagcggatcaaaacgattctttatatgtcacgaaggtatccgtaagatggtacagagagcttttaaaaaccattgatgccgctatggtgccgactgatgcgtttttaaaggtgccgcttttgcttatgcagggcggagatgacaaaatcgtcgataaaatgaaggtccgcaaatggttttccggtgtggcttcccataataaatcgtaccgggaatgggaagggctttatcatgaaatttttaatgaaccggaaagagaaactgtgtttaaggcggcaaaagcctttacagatcagtatatttgaattcgctgggggtgcatatgttgacagtaccggaacatccttttaaccttatggcaaaagtgtatcgggaaatttttccgctcgttcatcaggaattgaacatgtggcgggaaaaatcagattccattaaaaataccgaactgcggcagcaggcggccgcaagtatccgcgataaatcatttcattgtgaaggcggcggcattttagccctgctttcgggagagcagaaacagaaatgcgtgcaatttatcatcgcgtatcagacaatcagtgattatctggacaatctgtgcgaccgcagcacctcgcttgatcccgaggacttccgcatgcttcatctctccatgcgtgacgcgctgacggtcggtgccgaggtgcggccgtactatcagtacagagacgagcgggatgacggcggttatcttcatgagctggtcagaacatgccagcgggtgctcgggtcaatagaacattacggtatcattaaaccttatttgcttgagctgtgtgattattattgcgatcttcaggttcataagcatgtcgttgagcatgaacgcgttccgaggcttaaatcctggtttgagcagtaccggtcacagcttccggaaatggagtggtttgagttctcggcctgcgccggatcgacgttaggtattttctgtctcgttgcttactcattccagcctgattttaacgaacataccgctgagaaaatccgcagcagttattttccgtacatacaagggctgcatatactgcttgattatttaattgaccaggaagaggatctgcttgaaggcgatctgaatttctgtacgtattatcagtctcatgaagaaatgatgcagagactgcagcattttattgaaaaagcggatgaacatttgcaaggcattccgcatgaaaattttcatcggctgatcaacagggggctgctcggcgtctatttatccgatgacaaagtcgccggccaaaaagaaatgggccgcctcgcgcgaaagctgatcagggcaagcgggaaaacgtcatttttcttttatatcaacggaagagcctaccgcaaatttcagaagatggcttggacgaaaagttcgtaatggatgaactgcgcctctcgtgtaaatcacgacggcgcagttttttatttatgacgtgaagtatgaaatgaaacattgtttgcgcctgcagaatatgatactttaattttatgaaaaaattaaagtatttagcggtcatagcattactttccatttccggaggctgctccgtcatccatgcttccgccggctatcatcctgtcttgatagcgcacaggggctcttctgcgattgagccggaacatacagctttgtcttatgcgcgtgccattaaagacaaagcagattatattgagatagacttacgggagacaaaggacggccatctgattgcaattcacgataacacggtagatcggacaacagatggtaaagggatgacagatgatctgtctttggctcagattaagaaactgaatgcgggaaaaggagaaaagattttaacattagaagaaatcatacagaaattcggacaaactgccaattactatattgagacaagagaaagcaacggcagcctggtgatggaaaagaaactgattgacatattacaaaaacatgagctgatttccagccataaagcagtcattgagtcttttagcgggaagagcttaaagaaagttcgatctatgaataaaaaagttcctcttgtccgattattaaaagataacgaggctgaggagataaataataagcagctgcaaaccatcagaacgtatgctgatacagtcgggctcaacgccaaattggcaaatgaagcagtcgtgaagcgcattcatcacaataagatgaaagtgcacgtgttttttgataaggaagacgagcatacgctgacgcctattatgctgaaacaaaaagcagatggtgtctttacaaacaatcccgcttatacacgcggcttgctgcaaaacagtaaataaaaagagacatgcgcatttacgctgtctctttttttaacggtttcttttttgccgcaaggtgcattgcgaatttgccgatcagcccgatgacaaaaaatgcagcaaaccaccagtaataggtttttgcgaactcaaatcctaaatgtcttgataaaatgatgacgaacatcacatagggaacacttgaaaatatgatgcgaagaatattcaaactgccgctcctcccagatgttacacttaaaagatgaacttttttccattacttcatagtaattgatttttcagaaaaagtaaacacaaaaagaatcggcccgcttatgacaggccgattctttatttgccggcagatttcttttcaatcgctataataaacggcgggtcgtttcgctggttgagaaagccgtagctcagcacgcgcgctttttcctgatcaagattgctgcagtactccagtaatgcacttttttccgtcttgccttcaggatgcccgtggtacacaacgagaacgatcagcccgttctccttcagcagttcaaggagctgttcgatcgcggaaatggttgagtggccgtttgtcgtaatgcttttatcgccgccgggcagatagccgagattaaacacggcgcaagccacacgaccgtgcgcatcctcaggcagcgatgcctttatttgatcatggctcttatggtgaagcgtgacgcgcggactgaagtcggcaccgagccgctccttcgttttagcgagtgcgtccgcttgaatatcaaaggcatggacatgtcctgtctcaccgacaaggccggccaggaaatatgtatcatgtccgttgcccatcgtcgcgtcaaccgtgatatcaccttcctgtgcggcggacttcagcaattctttactgaaagggaggatgtgcatcaaggtcatagggcggtctcctccccgatctttctgaagagctttccttgatagcttccccgtgtttccagctctttttgaatggcgcccagtacttcccacttattgacgctccacatcggtccgaccattaattcgatcggcccgtctcccgtaatgcggtgaacgatcatttccgggggaatgatttcgagctgatcacatacaagacttacatattcttcttgagaaaggaactccagctttcctttttcatattgcttcaccatcggtgtgccttttaataagtgaagcaggtgaattttaatgccttgcacatccaaatcagcgacggctttggccgtctccatcatcatgtccctgttttcaagcggaagcccgttaatgatatgggaacaaacgcggatgccgtgttttctcagtttattgacaccctcaacatagcagtcaaaatcatgggcgcggttgatcagaagggcagtccgctcatgcacggtctgcagcccgagttcaacccacaaataggtccgctcattcagttcggccaaatattccacgacatcgtccggtaggcagtccggacgggtcgcgatcgacatgccgacaacgccgtcaagcttgaggacggattcgaatttttctcgcagctcctctaccggagcatgcgtattcgtgaacgcttggaaatatgcgatatatttgccgtctttccacttttcgtgcatgcggtttttgatatcgtgaaattgcgtgagtaagtcatcggcccgattgccggcaaaatcgccggagcccgccgcgctgcagaatgtacagcctccgtgtgcaaccgtgccgtcccgattcgggcagtcaaaaccgccgtcaagcgcgactttaaacactttatgcccgaaatgctcccgcagatgataatttaatgtatggtaccgtttttccgtatttgaataaggaaaagggttattctcgttcaatgttcaaaaagcctccctcacatcagatgcatcctaaaattgtagcatgaatgatggagcggaacaatgaaacaattatggaacggtcaggacgtaatatctacctggtttttctgttgttgttttaaacgttttggagaaatatcactgaacaatgcaaaaataattcctaaaataagaattacactgcctactttgaatgtattattaaaactgtcacttattttttcattatataaatttgaaatttttttctggatagccataacttccttcttttgaatattgaagcttttttgtactttttctttatacggatccggggttatagagagaatttcttcctcttttttgtttaattcagcaatacttttgcttcgatcgaaacctttactgtctgaatgctttaagtgagttattatctcgttctttgcatttttatcaaaaacctgattgctttccacaattttaatggcttcttttttcgcagtagctgtgtgatcatttatattcattgtaagcacagatgtaagtatggcaattcctagcgcttgtccaactgtccgcatcatattaagaatacctgaggcaattcctactttctcaggaggaataagccgtatccctgaactcattgctggtcctattacaagccctaaagctaagccggtcaaacataacagaataattactgacgttatagaactgtcgtatcgtatgtatccatataaatatgttgtgattgttaaaccgagcatacctagacccgaaagccaaatgcccccgagtttatcagatagctttccagaaagtacagaggtaaacatagatgatagagctaatgtagaaacaattaaccccgcttctaattcagtttttcccattaaattcgtgaggagtaaagtaataataagggtaccgcttgttaatccaaggccctgcataaagagggtgaaagaactgaaactaaatgtacgtatcttcagcatggataagggaatcatcgggtttttaattttagattcaataaagaaaaacaaacagaataataatacagagattacaaaaagagagataattaattgtgatgaccagcctaagtcagatacttttgcaaaaccaaaggttaaacagaagagagctccggataaaataagaatccccatgtaatcaatttttttactcactgtttcatcataactctcagtaataaaaaatgctgctaaaaaaagagaaatcagacctaaaggaatatttatgaagaagatagcttgccaattaaaattttcagttaataatcctccaagtacaggtcctaatgtagctgctaatcctgagaaagcaccccagattccaatgatcattccttttttattttgaggtacgatagctaaagctataggcattgtaacaggtacaatgaaagcagcagataatccctgaatcactctaattgtgacaagcatttcaattgaagtgctcaaacatgcaataactgatgtcaaaataaaaagtgctaatccaaacataaaagctttttttcttccaaaatggtctgccagctttgatgcacctactaataaaaccgcaaaagctaaagtataacctgtagccacccatgctacttgagaaaggttactcgaaaaataatccagcatcttaggtaaggcgatatttactatagtggtgtccattactgaaatgaatgtacctaataataatgcagatagcataattaatttttgaaaattcaaacctataacctccattagatattaatctaaattcaagttcgatatatatctaaaaacatgataaatgtaatcttaagaggtgtcaatattattcataaattgttttttcatccacttttctcgaaatcatatttttataattcaacaattttgtaacttgaaataactcaataagagctaaaattgacctgtaaattagctgagatgatgaaggatttctgaagagtgtgacatgaggagaacactcagcaagaggtgaggcaagtttaataaatctaggactgctcttgataatgctcagtcaggtatgtgcttaaaggaaaattctttaaaattaaaaatgaatattctttgaaagttcccttttgattgataatattaaaaatgtaaaatgtctgacatgaagatagtacaacgttttccttgtggaaaaagactttatggggtgtgaaaaagtgcggttaataattaatgacagtgtttcagaattctttgacaagatatcctctattctattcttggaacacgaggaattcttcaaagattatacaaccaaattgggtataaaattagataatgaatattttgtattactagatgatcttaaaagaataaaagaattagatagtgagtttttaaatttttattttggcagcttttgcgactacaaagatgttaggaatgcaaatattttttgtttagccacaaccttttttaaaatcccacaaatttatacgaaagatttttttgaaattattgattatttgtctgcagttacagaagaagagataagaaaaaatattttagagtctctaatttatttacaaggagatcttaaaactgaaacatctacccaacagtatttaaatgatagggaaagtttatttgagctacttaataatctaaatatcaagcccgaatacaagtggatcatatttaaggtaatgaaatctcctaaaacttatgtagatcaattttgcaataaattaatgttggtgaatggttatcttaacgaggcgatttataatttaattaaatttagagatgagtggatgaatcaattaaaaaacataaatatggattttccaaaaaagataatcagtacgttaaaaggtaaggaatacttatcttgtaattatattaatatatatccaacacttttaccttacactgcaactattacgaaaagtgaagataacatttatgttggactggggtataaagttgatgaaatttttgaaaatacattggagaaagcagagattaatcacatcattgattttttgaagcttttatcggataaaagtaagttcaagatattaattttacttagtcataaaaaaatgtatgctaatgagattgctgaacagctaaatttaaccaatgcaacgatttcacaccatatgagaattttgacattgcaaggtttagttgagagtacgagaaatcaaaataaaacatactattatcttaattcttcaaaattcgattctcttttgaacggtttgttgaaaaaatttaaagctgttccaggcttagatggggatgagtaaaaaaggttttggttttatagttggtgttagtttcgggatgataattaaagctaataaaaacagatcgtctaatgaattggatacccaaaaaatatgatgaatcctgggtgttttacacaaaaaagataatttgatggtgaacaatttaaagcgaacagaagatcttgtgagtgatgtgagaaaattttaatgtttttaataaaagaagaattaagttatcgttctaaaatggcggatttttataaagatttcattctgtcttgattaagttttacatttaatcgtattttataccatctcgtcttgtgtatgaattacctgaaatttcttgtgagaatttatttggaataagaaatactattgatatgacattatcaataggaggactgtttaatggcaacaagacaatcagtagatgaacatctccaaagaagcgaacaggcgtatgaatttgcgaatgagcaatttatgaccgcttcgaaacaagagcattataatgataatgagtacagtgaagcgcaaatgatgcttgaaaacgcggtgaatgaattaaacaagctgtcattatctgcgaatgatcagcaaagagagcagctttaccgaatgagattgcagctgcagaccttgcaaaacaatatgattttgcagcgtaattttgattactgaccgcgccgtttcaaatggttcagcaaacctgccggaatcccggcgggtttttttgtatttcttttaaaaaaagaattgacaatagggcggagtgtgtttattgtattacgtgtactacttgatgtaatacacataaaacactcgaaaaatgaaatcgacatataaatgttaaccatagggaaggggaactttcatgaaaaacaaaagatccgtaaaacaagatgtgcctcttattatcgccgcctcggttttggcaagcagtctgtttgtcgttcttgtcgtcatcggttttcaatggcagaacatttaaagaaagagagcagctcgtaaaagaaagaagggaagtaaatgattcaaatcgatccgagaagctcaactccgatttatgagcagatcatacagcaactgaaagagctttgtttaaaagggatcatgaagccgggggataaacttccttctgtcagggaattggcaacgatcattatcgccaatccgaacacagtcagcaaagcgtacaaggagctcgaacgcgatggtgtcattgaaacgctgaggggaagaggaacgtatatatcggagaatgcaaaaacgacattggttgaagggaagatgacgatgataaaagagcaattgaaacagctcatcatcgatgcccattacgcgggagttgagctggagaagctgcaggaatggataaaggaaatcagcgctgatgtgaaaggaggcaaggatcatgattgaattgcggaatctctcaaaaacgatagacggtaaagaagtgctcaaggatatttcgctcactatcggaaaaggtgaaattttcgggctgctcgggcgaaacggatcagggaaaacaacactgctccggcttattcagcagattctgctgccggatcaagggacggttttatttaatcaggtggaaataaagcggcatccgaaagtcaaacagaacatcatttatatgcctgttgaaaatcctttttatgacaagtatacatataaacagcttgttgcgattgtaagcagaatctatccgaattttgatgtgacttacgccaatgagctgatgaacaggtacggcattccggaaacgaagaaataccgtgaattatcgacaggcctgaaaaaacagcttgcgctcgtgcttgcctttgcttcacgcccggctcttatccttttggatgaaccgacggacggaattgacgccgtaacgcgtcatgacgtgctgcagcttatggtggatgaagtggctgaacgggaaacgagtattctgattacctcacaccgtttagaagatattgagcgaatgtgcaaccggatcggatttttggaaggaaatcagctgacgaatgtgatggacttggatgatatgaaggaagagtacatgaaaatccaaatggcatttgaagaggacgtcgccttgaagatcagagaacaaaacataccgattctcgaccatgccggtgtgttttatacggtgctgattcaaaagaacgatgagaagaaaaagaactttctgcaagagctgcggccgaaagtatggaatgaacttcctgtgaacttagaagaggtcttcatcgcgaagtttggagggaaccggagatggtagacaggggattgctgtacagggaatgggtgcagaatcgaactgttcttgtgatggtcggcatttttttagcggcggtcaatccatttgaagtgttaaatacctatctggtttatcaaggctgtctggacacccacggagcatattgtaagttttatgtgaattctttggatagcggaatgctgaacttaaactgggcgcccgctgtcattttggcggtttgcttattcggactggaacgtacgaaaggaacgattgatgcgcttttcagtctgccttattcccgcgctcaggtgtttcacactaaattttggctcggagcggcggtcattgccggcgctcaggtgatcggctacgggctggctgagctgctcattcttctgttaaagcctgagcgcgtatatttctttcaccattacagcgtcggagagattattgtgagtgttttggcttttacattggttgcgagcgcgggctgcttaacggggaatacgttcgcccagctgttgacggcgtttactgtgtcgatatcaccatacttgatcattacgttgccgttgtccaatgtagaagtcatcttcggagccggcatgtatgagctgatgccgtcagtcgatgcttatatcaaagtatacaatctttttcaatacttgaatccgatcatgtacattgatacagattgggtatctgccagcaagtatatattactcatcccggcagtgatgagcattgtattttatgccatcgggtacttttgctatgtcaggcagccggtggaacggaacggccgttttttcctttggagacagcttgaccggcccattcagattgtggtgatcataatcgctgttctcggttttggcctggcggggtactcgacgggacatacgatgacaggatatgtggccggaatgattgtcgggggagcggtcggatttttggtcagttattttgtgatttataaaaaaacaaagcatgtgtaagagaggaggaccggaatgataccgcggggactgttgtacacagaatggaaaaaaaatcagtggttgtttttatgcagcggcattcttttaatggcggcaaacccttttatggtttataacaactactcaacatatcaagaatgtttgaataacccagctcttcaagattgtgaattcgttgtcaattatacgaatgggtcgcctctttccttcagctggattgtgagtgtcatcattgccgtcttcttattaggcttggaacggacaaagggaacgatggatgctttgttaagcatgccttacagcagaggccaaatctttcagacgaaattctggcttggcgcagcagtcattgttgttcctcaggcgataggctatggagcggcgtcattgctgatatctttgctgaaaccgagccatacgtacgattttgatcatttttcaatcggaatgattgtcatcagttttatggcttacgccttgttaatggcatccggcgcattaacgggacagatattcgcccagctgttaacggcgtttaccgtcacggttctgccctttttactcatcggtctgccggccgcgaatttggaggtcgttttcgatattagtgtgggaagtcaattttcttttatcagcagttatatcgaatcccgtctttttatatttgtaacccctattggatatgtgtttaacgactggatcagagaaagggatttggttttaatcattccgattgtgatgagccttgtcttttatctgatcggttacgtcagctttctgaaacatccgaatgaacggaacggcagattctttctttggagtaagttggaccggccggcgcagatcttggtgattgcctttgccgttatgggtttcggcgttttcggatacggggtcacagacacgatgttcggctatttagccggcattatcttcggcgcggttatcgggtttttcatcagttattttacggtttacaggaagtcaaagcatatgtagatctgtttgaaaatgagcagtttggaggaaggcaaggtgccgattagcggtttgctttataaagaatggaagcagcggcagacactgctgcttctcacagcggggttcttagttattttaggccctttggcaattataaatgagtattttcactataaggattgtttgagtgtgcttcatcaatattcaggttcagtttgtacgttcagcattgattacagcaatcggaatttgattgggcttcatttcattcctccggttatgatggggctttttctgataagaggaggccgggctgaaaggatgtttacactgagccttccgtattcgagaagccggatatttcatacgaagtttttcttgggagcagctgtgttagccggctcgcaatttgtttcttacggagtatctgacatattgtttctagcgcttaaacctgacgctgtccatcattttcaatcattcagcgcagggatgctggtcatcagcttgatgatttatgcattagtgacagctgccggcacgataacgggcaatttagcggcgcagctgatcacagcgttcacggtttccgtctttccgatcgtggttatgacgatttacctgttaaacgccgagttcctttttggcaggcaggctgtgccggatattgatttcccttggagcggatttctgatctatttcatgcctgccgcttacatccatacatcatggatgtattacatgaaacacgcattgttaatctccgcattaatgggatgttgtttctatctattcggctatgtgaatttccttaaaatgccgagtgaacgaagcggacattttatcctgagcaaacacattgaacgcatcattcaagtgctcgtcatggtgctcagtatgctgggaagtgcgggggtgtgcggatatgcttataacggttcgtataccggttacatattcggcatgcttatcggcgcggttatcgggtttttcatcagttattacttcatctataaaaaaacgaaacagatataagggggagtggtgtacgtgatagaagtacagcatattgatcattcatttaaaatcggcaggaaaggcagagagagtgaggttccggtgctgaaggatgtctctttgaccgttgaaaaaggggaaattgcctgtatcgtcgggcggagcggttccggaaaatcaacgcttctgaatttaatatccggatacatagcgccgacgaagggccgtatcgtcattaacggcactgatgtgacgggcttcagtgaaaaagagtgggcgcagttccgcctcgggcatttcggctttatttttcaaagctttcagctcattccgagtctgacaacctatgaaaatgttgaaatgccgcttgccttaaaaggcgtcaaaccgtctgaacgcaagcagaaagtcgcggacatgctgaaacgggtcggacttgagaatcatgcgaatcattatccgaatgagctgtcaggcggccagcagcagcgtgtcagtatcgcaagagccctgattttaaatccgtcgattattttagctgatgagccgacgggaagccttgattcagaaacggaacttgaggtgcttgcattaattcagcagctgaaccgggagcgcgggattacatttgtcatcattacgcatgacgatgaagtcgcttcgatcgcgcattcaaaattccagctgcatgacggtgtattaaaagggggcgttactgttgagatttaaggatcagattcactttatcagaagaaatatgaagaaaaaccggctgcgtgttttcatgacggtgctggcgacgacaatggcgtgcgcgtttttagtggtgctggcttccgtcggattcggcatccaaaaaacgattacagacattacgatgagccagcagattgttacggaaatcaatgtcctcggccaagagaacggaaaagccgtgaagaagtcagacttggaaaagtataaaaatgtcaagtctgtcgttgaaagaacacaagtgtatgaaccgaacaaagcgtcattgggaaaccgaacaaatgaagattcagccattgtgctgacaaacatgaacgatgaagtcaaagccaatatggagcttgatcggggaagagtcgcccgcacagagaatgaaatcgtggtcggctatgattttgcgaagaacctattgacgaaaaaagaggctgacgcttacgacaaagagttaaatgatcaccaaggcgacatgtcggaggtgaaaaaaccaaaaggctatacgaaagacctgcttaataaaacgatacagctgagcatctccaaaacaaacaaagacggagacgttgaaaaaacgaaaacgtacgacttcaaagtagtcggaattacaaaaaaaccgtcccaagattggatggaggatacaaatatttttgtgagtgatcaattcaagaaggacttctcaacattcttggatctgaagaatggaaatgcggaaaaaagcatcaatgtgtatgcagacaaattcgatcatgtcgatcagcttacccatgacctcacggatgacggcttttatgtcagatctgtcacaaccgagctgaagggcgtcaacacctttttcctcgtctttaaaatcggcctgatctttgtcggctttatcgccgtcgtgatttctgccatcggtattttcaatacgatgacgatggcggtgacggaacgaacgcaggaaatcgggattatgaaagcgatcggcgcaagcccgtccatcatccgcagaatgttcctgatggaaagcgcctatatcgggatattaggttctgtcatcgggattatcatttcttacggagtgagttttgccgtcaatctggctgtgccggttattttgaaagcggtagggggaaacaccggagccgaagatcttcattataccttctcctatatcccgctcagcctcgttgtgattgcagttgtcatttgtgcgggggtcgcggtaatttccggtatgaatccggcccgcaaagcgacaaaaaccaacgttctgactgcattaagaagagaactgtaaaggaaaaaagccggctggacatcagccggtttttcctctatctatcagaaaagggcggataccatgtttcacattttgttaatagaagatgataacactttgtttcatgagatgaaagagagattaacgggctggtcatttgcggtgcacggaataaaagatttcagccgggtcatccgggagttttctgaaatcaagcctgatttggtgatcattgatgtacagctgccgaaatttgacggctttcattggtgcagaatgatacgctcccaatcaaacgtgccgattctctttttgtcctcgcgcgatcatcccgcggatatggtcatgtcgatgcagctcggggcagatgattttattcagaagccttttcactttgatgtgttaatcgcgaaaatacaggcggtgttccgccgtgtgcatcaatacggcacagaacctgcgctgatgaaaagatggtgcggggcggtcattgacacagaaaccaacacggtcagccgtaaaaacggttcggtcgagctgaccaaaaacgaaatgctgatcttaaaactgctggctgagcagaaaaataaaatcgtcagcagggaagaactcatcagaagcctatggaatgatgagcgtttcgtcagtgataatacgctgacggtgaatgtcaaccggctgcggaaaaaactcgatcaattaggcatcgggaaaatgattgaaaccaaggtggggcagggatacatcgcaaaggaagaagacggtctttatgattaaatcatttctgctcgaaagaaagagctggatcgcgatgtttcttttgcagcaggctgtgctcctttttgcggcatatattgatccgtctattccgtttctttcagtgctgtattttgtttacttgtcgcttcttgtgtttcttgtatttctcttgttccgctatcgtaaagagaccgcctattataaaagcttaagagagtgggacgccaatttagacatgtcttaccttaaagcgcctgacagtccgtttgagtctatcgttgaagaaagcattgaagggcagacagagcagttaagaaaaagctcacttgatcttcaggcggcgtcagagcatgaaaaggacgatctgatgtcatggattcacgaggtcaaaacaccgatgacagcgatgcatctcatgattgagcgccttgatgaacagccgctgaaagcccctttgctgtatgaatggctgcggattcaccatcttctggaccagcagcttcatcagaaacgattgtcctttattgaaaatgatttatcattccagcgaattcagctcaggccgctcgttttcaaagaaattaaaaatctgcaatcatggtgtatacaaaaagggatcgggtttgacattcagcttgattcaccagacgttcacagtgacggaaaatggctttccttcatcatcaggcagctgttaagcaatgccgtcaaatacagtgaggcggatgacattaccgtaaaaagctatgaacaaaacggccgggtgcatgtggatatcgaagaccgcggcatcggcatcgagcccaaagatcttccgcgcatttttgaaaagggatttacctcgacgcgaatgaggcgtgatcacgcgtcaacggggatgggcctgtatttggctcaaaaagccgcggcaccgcttcttatccagatcagcgtgcgctctgagccggaaagcggcacggtttttaccttggtgtttccgaaacagaacgatgccgtcagcatgttcagcgtgtgacaaaagtgtcacatgcttttctcttttgttcgcttaatcaaacgaaaaaaacggcttctgtttttaaaataaagataaccaatgtaaaaggagaatcagaacgtgatgattttagaagcaggcaatatccaaaaaagctacggaaacaagctgaataaacaagaggtgctgaaaggaattgatcttcagattcacaaaggggaattcgtcagcattatgggcccgtcgggatcagggaaaacgacccttttgaatgtgctttcctccattgataaagtgagcgcgggcaccattaaactgaatgagacggagattacatccatgaaagaaaagcagcttgccgaattcagaaaacggcatctcggctttatttttcaggattataatttattggacaccctgaccgtgaaagaaaacatactcctgccgttatccattacgaaaatgtctaagaaagaggcggacctgcgatttgccgagacggcagaggagcttgggatctatgatttgcgacataagtatccgagtgaaatttccggcgggcaaaaacagcggacgtctgccgcaagagctgttattcacgaaccgggcattatttttgctgatgagccgaccggagcgctcgattcaaaggctgccatggatttactgaataaactcagccgtctgaatcaaaaacgccgcgccaccattgtgatggtgacgcatgatccggttgccgccagctattccggacgtgtgattttcattaaagacggccgtgtgtatacacagctgaataaaggcggccaggacagaccggacttttttcaggatattatgaaaacgcaaagtgtattgggcggggttcaggcatgagtattcatcatttgatcttccagaacctgaaaaagaatttgaaaaactattacctttacgtttttgcgctggtgttcagcgccgccctttatttcgcgtttgtcacgatgcaatacgatccggcgcttgatgaaatgaaaagctccataaaaggagcggcggcaatccgggcagcctctgtactgcttgtggcgatcgtgtcggtatttcttttgtacgccaacactatttttattaaacggcgcggccgggaaatcggcttattccgattaatcggcatgacgaaaatgcacattttccgcatactcagcacagaaaatttcattttgtatttcggatcgatttggatcggtatttttgccggcttttctctctcgaaattatgtatgatgatgctgtttcatacagtcggtgtgaaagcctctgtctcactgtttttttcaaacaaggcgctcgttcagacgttaattgtgttcggggcgatttacgtgctgattatgatgatgaattacttatttattaaacggcaaagcattttgtctttatttaaaaccgcgtcatcgtcagaaagcggcataagacggctttcttgggtgcagatgtcgatcggtgttgtcggtattgcggccattatcgccggctatgccgtgtccgcggatttattcggaggcagttttacgagcatgaatgaactgttttcggccatggtgtttattctcggctcggtcattatcggaacctatctgttttataaaggttcggtcagctttctggcaaatctcatccgaaaatcaaaaggcgggtatctgaatgtcagtgaagtgctgtctttgtcatccatcatgttccggatgaagtcaaacgccgtcctgctgacgattattacgactctttcggcgctggcaatcggtttgctgtctttaagctacatctcgtactattccgcggaaaaatcggctgagcaaaatacagccgcggactttgcgtttgataaccaaaaggagactgactcatttaccgctttattgaagaaaaacggaattgaacacaaagtgaaaacaatcaagaccattcaagccggtgtcaatatgaagaacatcataaacggcgatatgaaaagctttcaacaagacccgtccagcttggcgctgccgattataagcgagaaagacgcggaagggacggagctttctgacggagaagccgtgtttaccggatataatgatatgatgaaaagatttctcgacctgaaaacgtcaggatccattgatataaacggtaaaacggataaaataccgctggcgtataagggcttgaagaacgacttcctcctgtcatatacatttacaagcggagggctgccgaccgttatcgtcacgcagcaggtatttgaccggatcgagaaagatatcgatccgtccattcagggaaaatcaaatcgttttttcggcattacactcaaacgtgaagaggacatccaaaaagctgatggtctgtttcaggcgcagcactattcagacggtgcgctttcacaatttgaaacggctgacacgcaaaagaaaaacatggggctggtcatgtttattgtcgggtttttaggattaacctttctgattacctcaggctgtatcctttattttaaacaaatgggcgagtgtgaggatgagaaggctgattatacgatattgcggaagctcggcttcacaacgggagatctgctgaaaggcatccgccggaagcaggcgtatcatttcgggattccgctcgttctcgggctgttccacagctattttgccgttcagtcaggatggtttttattcggaacggaagtgtggacgccgatgatcatcgtcatggcgctgtatacgctgctgtactccatcttcggcatgctgtcggtgctgtattataaaaaggtcattcaatccgccttgtaaaacaagttgaggagcctccgcataagcggaggctttttttgtatgaatagaagaaagcgatttttaaaagaatagacatacgtcattttttcgcgcgggggagccttatgcagaagtattttcaattgaaatctgaaacaggggcctttcatcttttttccaaggaacacattttcacgctgttgatcatcggattgcttggggtgtgcgtgatcatattccggaaacagctcaaccagagtcgcatgatccgctatgtactattcattctccttgccgtgtcgcagatcagctatcatatatggctgctttgtcatcatgcctggtcgctgaaaacagctctgccgctgcagctgagcgacctttccgtctatttggcgatgctgatggtcatgacaaaaagcaaaaaactgttcgccttcctctattttgccggtttgggcagcgccgtacaggcgatgacaacacctgatttaggggcgtattctttccctcattttcggtacatcgtgtttttcgtctcccacggctgtgtttttcttacctgtctattcatggccgctgcagaaaggtacagaccgtcggcgcgcggactgtgggtatcggtgctgatcgtaaatctgtacggggcgtgtgtcttttttattgatcgtatgctgaatgcaaattacttatatttaatgaaaaaaccgaagaccgcttcgcttctgaatgttttcggaccttggccgtggtatcttctatcaatggaagcggcggtgatattgagctttttcattctgtatatcccgttttggctgctgaggaaaagagcgtgaggccggcctgtttttgtgaatccaatcatttgtaattttttcaacattccggcattatttttttcagattctgatgttgaaaaaagatgtccgcggcgatagaatgaatgtgctatgataacgtgttcgatacggagccgcggcttgcggtttccgttttttcatggggttttttatagagagagggggatcggtatgccgcgcgctttgaagatattaatcatcggaatgtttatcaatgtgacgggcgcatcttttttgtggccgctgaatacgatctatattcataatcatttagggaaatcgctgactgttgcggggattgttctgatgctgaattccggtgccagtgtggcggggaatttatgcggcggatttttgtttgataaaatcggcggattcaaatccattatgctgggcattatgatcacattggcaagtcttctcggactcgttctgtttcaccaatggcccgtttatatttggctgctcatcattgtcggcttcggttccggtatcgtgtttccggccagttatgccatggcgggagcggtatggaaagaaggcgggcggagagcttttaatgcgatttatgtagctcagaacgcaggtgtcgccgtgggctcggcactcggcgggatggttgcggcgtactcgtttacgtacgtgtttttagccaatgctatgctgtatgtgctgtttttccttatcgtatttttcgggtttcgaaatatcaaaactcagcatgcgagccaggtttctgttctggactacgagcctgtcagcagcagaacgaaatttacggcgcttctcatattgagcggcgggtatgttctcgggtggatcgcctattcgcagtggtccacaaccgttgcgtcacatactcaaagcatcggtatgccgctttcattatacagtgtgctctggaccgtaaacggaatattaattgtcgccggacagcctctcataggagctgttctgaaaaaatggtccggtgcgttaaaaacgcagatggtcatcggcttttgtatttttatcgtctcgttcggcgtgcttctcagcgccaagcaatttccgatgtatctcaccgcaatggtgattttaaccgtcggagaaatgcttgtctggcctgccgtgcctaccattgccaatcagcttgcgcctaaggggaaagaagggttttaccaaggattcgtcaacagtgcggcgacgggcggcagaatgatcgggccgcttcttggcggcgtgctggttgatcagtacggaatgagcgtgctgctgttgatcctgatggtgcttcttgttgtcagcatcgcagcgacggtgctgtacgacaaacgcctgaaaaccgttaataaacaaaacgtccaagtgcgatgacgacataaaaaatcccgctgtttcggcgggatttttttgtttatacgaccggaagcacgttgacggcgtccttaacgtttaaatatgtctttaatgaagaaaagctggcatcaagctgattcattctcatggcgagggaaggcttgatacccgtgataatcagttctgtgccgattaatttaagcaggtggtgcaatttgaaaatccggtctgcggtctgttcgtttacctcggccaaacctgataagtctataattaagtaatcatctttagatgcggttaatatgtccgtcaaagttgtcacaattgaatcaaatcgttcttccgttaagtttcccactaacggcaaggcggagatgccgtttcggatcggaacaatcggtgttgaaagcgtcgtgatttctgtgagggaatcctcaaggagcttttcgtattctttctgctctgtaatgtctttttgaaaaccgacaaaatagagcttgtcttcaacatacagaggatcaatgttgagttcattccaaaatggggtgccgtcttttttgacgtttttcagccgcaccgtgatcttttctttctggtttaagctctttctgattttcgcgacttgttgacggtcggtttctttgctttgcagaaatctgcagttcttacctaatatctcttcggaagagtagcctgtcatatccataaatccctgatttgtatatatgatgggattgtcctcaagagaggggtctgtaatcaccacgccgatgcgtgcgtgatcaagcgcctttttgataagctccagctgctccagttttccggatacatttgagtcagccatgtaaaacccccttttggccgtaaagctgcgcgctttttcagccattgtttctcccctttttaaatgaatctacagtaaccgtagcataacatatgttctgattcaagcaaccgaagtttgcaatttgtcattcgggcttgtcctcatatacactgaatatataaggggaaggcacatcatcgctaagtaagtgactaggtcattgtcactgggtgaaaaatgaatctaatgcatcaagcttaccgatcatgtgttcacatataatggaagaaacaagctttttactttcctgctcaatcgccggtatgtagatatcgaaaatcatcgtattcgtaagggggctggatggcctgaagtcgctttactaaataagggctttaggaaggtgatgaagatgctgcatcaggtaataattgcttgtgtaattggaggaatcatgggggttctcggtcatgtgaaaaagagaggcaggctggagaaacccagaatgacaaagcggtttatctatctcggttttttggaagatggttttatcggaatggctgcttccatcttacttgtcttatccgctgaccccgattcaggaattcaactcgtcatcttatccataatcgcaggctacggcggagaagctgttctcaggagctttgattttgtcagagaacaaaacagtgattcggccgaagcaaaaccacaccagcaaaaaaatcctccatcaaaataatatccccgctcacgacccgttccgggtacattcccattgtatacaaacctgcttgcacttatgaacagaattctataaaatacaggtaagattacggtagcgataagaacagtgaagaggagcagtaagaagcagatttcgcactcagagagttgacggccggtgcaagtcaatcaagtctgtttccgaactcgcctcagagttgcagcggcaaaaccgctgacgcataactgcgttaaaagtatcaagtgagtgcggcttaaaaccgcgctaacgagggtggtaccgcgggaaacaaaaatctctcgtcccttttagggatgagggagttttttttagttttagaataatctgaatataatcttcctcatcccgtcaatacttggactacatacgccgtattcaatcagaaggaggtttttacgttgagttttcagcacgaaaaaatagaaaagaaatggcagaattactggttggatcataaaacgttcgccgtcagtgaagagaatgacaagccgaagttttacgcgcttgacatgtttccgtatccttcaggagccggccttcatgtcggacatccggaaggctatacggcaaccgatatcctttctcgcatgagacgcatgcaagggtacaatgtgcttcatccgatgggatgggacgcgttcgggcttcctgccgagcaatacgcgcttgacacggggaatgatccggctgagttcacaaaacaaaatatagataatttccgccgccagatccaatcactcggattttcttatgattgggatcgtgaaatcaatacgactgatccggactattacaagtggacgcagtggatcttcaccaagctgtacgaaaaagggctcgcttacgtagacgaagtgccggtcaactggtgcccggcgctcggaacggtgcttgcgaacgaagaagttattgacggcaaaagcgagcggggcggccatccggttgaacgccgcccgatgagacaatggatgctgaaaatcaccgcttatgcggacaggcttcttgaagatttagaagaacttgactggccggaaagcattaaagacatgcagcgcaactggatcggacgctcagaaggcgcaaacgtgcatttcgcgatcgacggcactgatgacacgtttacggtttttacgacaagaccggatacgctgttcggcgcggcttatgccgtactggctcctgagcatgagcttgtggaggccatcacgacacctgaacaaaaagaagcggtagacgcttatgttaaagaagttcaggcgaaaagtgacctggaacggacagatcttgcgaaaacaaaaacgggcgtcttcacaggcgcatatgccgtaaaccctgcaaacggggaaaagctgccgatctggatagcggattatgtcctcgcctcttacggaacgggcgctgtaatggccgtgccggcgcatgacgaacgtgattttgaattcgccaaagtgttcagcctgcctgtcaaagaagtcgtaaaaggcggaaacacggaagaggaagcgtacacgggagacggagagcatgtcaattccggctttctgaacggactgaataaagcggaagcgattgaaaaaatgatcgcctggcttgaagaaacgaaaaacggtgagaaaaaagtgacataccgtctgcgtgattggctgttcagccgccagcgctattggggcgagccgattccggtcattcattgggaagacggcacgtcaacagccgttccggcggaagagctgccgctgattctgccgaaaaccgatgagatcaaaccgagcggaacaggtgaatcaccgcttgccaacattaaagagtgggtggaagtcactgatcctgaaacgggcaaaaaaggcagaagagaaacgaacacgatgccgcaatgggcgggaagctgctggtatttcctccgctttatcgacccgaaaaatccggatcagctcgcttcacctgagaaactggataaatggctgcccgttgatatttacattggaggagcggagcatgccgtgcttcaccttctgtacgcgcgtttctggcataaattcctctacgatatcggtgtcgtgccgacgaaagaaccgttccaaaagctgtataaccaaggaatgattctcggggaaaacaatgaaaaaatgagtaaatcccgcggaaacgtcgtcaatccggatgaaattgtggcgtctcacggagcagatacgctccgcctgtacgaaatgtttatggggccgcttgatgcatctatcgcctggtctgaatcaggtcttgacggagcgcgccgcttccttgaccgcgtatggcgtttgtttatcgaggaaaacggcgagctgacgggcaaagtgacagaaggcgtaggcgaaactcttgagcgcgtctatcatgaaacggtcatgaaagtgacagaaaacttcgaagcccttcgttttaacacgggcatttctcagctgatggtcttcattaatgaagcttacaaagcgaatgaactgccgaaagactatatcgaaggttttgtgaagctgctttctcctattgcgccgcatttggctgaagagctgtgggaaaaactcggccacgaaggttcgattgcatatgaggcttggcctgcctatgacgaatcaaaactggtggacgatgaagtggaaatcgtcgtccagctgaacggaaaagtaaaagcgaaattaatggttccggctgatgctgataaagcagcgttagaacagctcgcacaagctgacgaaaaagtaaaagagcagcttgaaggaaaaacgatccgaaaaatcattgccgtaccgggcaagcttgtcaatatcgtggcaaactgaccgggcgaagcccctctcctacagagaggggcttttttatcagcctctatcatagaaattgcaccgcgggctttggtatacttaataccataaagatgaatgggagtgtcacacattgaaaataaatgaaatcagcacagccgcactggaagaaaaattaaaagcgggagaagagctgtatctgattgatgtcagagaagacgaagaagttgccgaaggaatgattccggaggccgttcacatccgcatgggggacatccctgagaagatggatgcgttagacaaggacaaggaatatgtatttatctgccgttccggaaaaagaagcatgaacgtttgtatgtatttacatgagcagggcttccgtacggttaatgttgaaggcggcatgctggagtgggaaggcgaaacaaagccgaagaaataacgctttgaagtgaaagaagaaaagggatatgcgtctttttcttctttttttataaaaaaacgggaggcgaatcaggtgaaaccgatgatccgcgcgatgaaaacaaacgatatcaaacaggtccggcaagtcgcagaacgcagctggcatcatacgtatgaagggattattcccagacacattcaagatcagtttctcgaatccgcctatcaggatgagatgatggaacgccggctcttgcattctctgttctttgtggcagaagaagaggggcgagtgctcggttttgcaaatgccaccccggttcaaaaagacggaaatgcggagctgaccgccatctatattgacccggattgccagggaaacgggataggcacggcactccttaaagaatgcatcaggcagtccggcggggtaaaaaagctttatgtccatgcagaaaaagagaaccgcattgccttatccttttatcaagcgaaagggtttcaatgggtatgtgaatttgaagaagactttaaaggacacactttacagacggtcaaactggtactgaacatataaaagcgtccggccgcccaggaccggaacgcgaatgatcagtgataagccggaagccggtctttgtgcgcttcaaataagtcatcgcacaaagatatgatgtcattcatggaaagctcggcgctcgtatgcggatcaagcatggccgcctgatatacggcttccttttttaatgtaacggccgcttcgatggttaaaagctgtgtgttaatgtttgttctgttgagcgccgcgagctgctcgggaagttcgcccgaatagcacggcataatgtggtttttgacggctgtgcaaggcacttcaacgaccgctttcgccggcagattcggtatcagcccggtattcagcacattgccgccgaatgtgaacggtttgcccgtctccatcgcttcaataattctcgaaccgtattcttttgagcgttcatgcgtcaggttttggttgttgatgatgccgtctctcatcgtttcccaattgttgatttgttccgcgcatctcctcggatattcatcaagcggaatttggagttcatctatcagctccggataccggctttttataaaatacgggtgatattcggcattatgctcagatgattccgttacgtagcagccgaatttatccatcagctcaaaccgcaccatgtccttatgtttcgtcttttgtttttcgcgtgcccgtcttttaatttcaggatataaatcaattccgtcttttttaatctccaaaagccaagccatatggttgatgccggcaatgcgttcttccgtcccttcgtgatccatgccgagtgagtcaaacagatctttggtacatacctggacgctgtggcacaggccgaccgttttgacatttgtatgtctgagcatcgctccggtcagagaggccatcggatttgtatagtttaacagccacgcatccgggcagacctcttccatgtcttttgcgatgtcaaataaaacggggatggtgcgaagggaacggaaaatgccgcctattccgacggtatcggcaatcgtctggcggagaccgtaccgcttcgggatgtcaaagtcaatgaccgtcgcgggtttatagcctccgacctgaatggcgtttatcacatagccggcgtgtttcagcgcctgttttcggtcatcgtaggagatgatggatatactcgtattgtagcggtctctcatgttttccagcatgagctgggattctttcagccgtacagcgtcaatatcataaagcgcgaattcaaatccgtttaatgcttcagtcagtaagcagtcccccaatacattttttgcgaaaatcgtgcttcccgctccgataaatgtaattttcttcaacagaaattcctcccttttcttctcagcctttgaccgccccggaggacagccctgagataaaatatttttgaagcgccaaaaacaatacgaccatcggcagcatcgccatgatcgcggctgcggcgactaagtgaagattgttcgcgttttcgccgaaaaatcccgccatggccacggtcaatgtctgcaccttttgatcttgtaaaaagaaaatcgcaaattggtaatcgttccagataaacacgcaggaaataatgcagaccgttgcggtaatcggtttcaacaaaggaaacacgattgtataaaaagtcctgatcaatcccgcgccgtccatcctggcggcttcctcaagctctttcggaatggaagagcggataaaccctgaatataagaaaacggtcagcggcatatatgcagccgtattaatgagaatggctgcggcatgcgtattgatcagccccgcatcagcgaccatcttgtataaaggaaccatggaagtcaaaggcgggatgatcatgattgaaatcaaaaggccgaagacgattttgttcagctttgtatttcttcttgcgagcgggtatgcggcaagcgaacccatgaaaattaacaaggcggcggaaacggctgtaatgatgatcgtgttcagaaaggattgcccgagagaggcacgttcccatgcttcacgaaaattttgaaaagaaaaggcggatggcagcgaccattttgaactgtagtctccttttgcttttaatgacgtggtcagcaaaatataaaaggggacaatatgaatgcacgagataacggctgccaacagcgtaaaaatccgcattcgggctgttttcatgacatttccgtctcctttcgcttgaaatacacgagagccgaaaagctgatgacaagaataatgacggacataaacacgccttgggcggcggcatatcccgcatcctgccgtttaaaatataaatcatacataaacgttgacatcgattgagaggaattgcccggcccgcctgcggtcagcgcgataatgacatcaaacagcttcagcccgccgatgatattgatgaccatgttgatggtgacagccggcatcaataaaggcagggtgatggtgaaaaacggctgaagacctcccgcgccatccatttttgcggcttcgtaataatctttcggaatgctttgcagccccgccaaatatacaatcatcgcaatgcctgcgtattgatatgtgttaatcatgacgataatccacgggtttgccgcagggcttgccaaggcgttgacaggaccgattcccagtgcgccaagcacatcattcagcgcacccccgtcatatgagaaaataaaataccaaatgtatcccataatcagcggactgataatgacgggcaggtagacgatcgttcttgtgagcgccttcatttttaagctctgattcaagagcagcgcatataaaagtccgagcatattctgaaaaaaagtgcttccgatgccgtaaagcaaagtgtttttcacaacaagccacgtgtccggatctgtaaaaagccttttatattgagtgactcccacccattgatacgtctgtgagaagccgttccagtttgtaaacgtaataaaagcgcctttgacaaacggaaaaatcatgaaaataaaaaccgtggcaagggcgggaacgtacatccaccatagtgacgcggattttaccggcttttgatgttgaaatccttgggtttctcttgcaagatcactcattctttttcagctccccgtgaatcagattgaagccggagccgcttatattccctgccgagtttcgctgaaatttcagcgggggttaagatatcggccatcagctcctgcccggctgttcccatcacatcccacattccgtttggcaaataaaggcggtcaaaataaggctgcaccttaatatgctgatagcgcttatagtcatttgcgtagaaaatgtccgtttgcacattcactaatccggccggaagcgaggtcgcttcggcaattgattttgcatgctcgggtcgggccataaatgcgataaactgtttcgcttcttcaagccgcggggaatccttgaatgccgccagcgtgtaacgttcgcctccgatccaaaccggcgcgtctcccttgtggacggccggggtcggtatgatgccgacttttaccttcggattgatttgagcgacgtcttggccgagggtgccgccctgcagcgtaaaggcgattttgttttgcgccatcagttcaatgagctgggaccgttttgccgtcacggcatctatattgagcaggttttccttttgcatctctttcagtttgtcagataaataggtgaagtgtgtccagcggaaggttccgtttaacagttgttttttgtaacggtgtgcgggatctgtgatgagaagcggtgcggcgaattgatcgtaatattgggcaaatgagcttttctcatagccggcaaaccagaagggggtgactgttccgccgcttttttctttaatctgtctcagtgccttcataaaatcatccattgtttccggcggtttgattccgtatttttccaacattgtgcggttgtaggccagtccgtcctttgcctgattcagagggaaggcgtatattctgcctttggcgtctttgagcatgctgtttaaattcggatcgagccgcttcgtccaagacatgccgctgaggtcggcggtatattctccgtagcggattttggcccagccgtgtgtgtcgaaaagatcaggcatatcaccggccgccatcctgaccctcatcatattttcgtagtcattgcctgggaaatgaacgtttacttgaatgtccggatgttctttttggaatgaatcagccaactttctgaatacggcgcgttcgctgtctgaggatatggtggaatagactgtcaatgttttctgcttttctccggcgccgctctgttctgccgagcagccgggaagtatcatgcaagtaaaagaaagaaacaaagccagtaagcgtttcatcttttcctcctttaaatatgatataaacgctgcgggacacgtcacctcctttcttgtgagccgcagctttgtctgacaatcaatgaagtggggagcgtcacggccagcgggacggttctgccgtttaaacggtcgagaagcaatttgacacccgtccggcccatctcttccgtgtatacttttaccgttgataacggcgtgctggcgtattctgcctcatcaattccgttgaagctgacaaccgccgtatcgcgcgggacttgaaggccggcttcctgcaaggcttttaaagcgccgacagccatcgaatcacttgcgataaaaaaggcatcggggagacttccgcctttgatggcttcattcatcagccggaacccttcgtgcatgctgtattcgccgatcagtacatgctccggctcggcgccggccatttgtaagaaagcggtcagacgcttatcctcaatcgttttattgctgtttacaccgtctatgacggtatgctcccgctcccggccgccgatataaccgagccgttggtaaccgagcgacagaagatgttctatcgccttctgcgctgcggcataaaaatccacgctgacggaatcgtagcgggcgggatcgggggtgccgttaacaaataccgcgtgcctgaaaacggcgctgatattcgtaagcgcctcgtcttgcaggctgccgatgacgatgacgccgtccagttcgtgaaacatatgctcttgaaaagaaccgagatggatagaagatgtgataaaaattttttgccgaaagcattcttcctcaatgccttttcggatcgccgaaaaataaggatcctgccgttcttcttccggtgacaggcagctgacaacgccgatcaggggcgctgaatcgctgcggctgcggttcttccgtctttttgccgacggctgatagcccagctcatcggcgatcctcagaactttttctcttgtttcatcagtcacagccaaagagtcatccttattcaaaattctcgatactgtcgcgctggatacagatgcctgtaaggcaatatctttgagacggaccatttcgcatctcctttttactaaatatttactaaacagaaatgaactggttattgttaaaatgatattatcatacgagagtaagcgttttcaacaactattttcggttacttttagtaaaaatcagtaaaaaagaaaatctgtttttctctatcatatttcaattgaaccggaataaattgatagagaaaggagagggtgatgtgctgaagatagctgtttttgatgaggagcatgaaaaggatctgcagactgaagtcaatacatttttaaaggggatttctgatgaacagctcgttgatattaaatatacggtagcggcggcctgtgatcctgaaggtgagcagctttattgtttttccgctctcattttataccgaaaataaagaagcccggacgaaatgccgggcttcgttgttcattatgcttttttgacgcggggacttctcggtttttggtatttctccgcttgtttgattccttttctttcgctcgctaatgatttgtacagagacacgatcatcagaaggatcacgactgaaaacggaaccgcggcgagaatggccgtgttttgcagtgcggccagaccgccggaatataataatacagctgccacggcggactggatgacgccccagatgattttcacccggtttgacgggtccaaagagccgtaagacgtttgcattccaagcacaaatgtcgctgaatccgctgatgtaataaagaatacagcgatcagaacaagcgttaatacggatgtcaccattgtcagcggatagtggctgagtgcgccgaacagcatcgtatccgttgacatacccgcgacattgaatacgcctttctgctgaagatccatcgcggatacaccgaagatcgcaaaccataagaaagccaatatacaaggtgtcaccaataccccgattaaaaattcccggatcgtccggccccttgatacacgggcgataaaaatgccgacaaacggcgaccaggatatccaccaggcccaatagaaaatggtccagctgttaatccattcgcgtttttggggatcattcggagacaagcgaaagctcatctgcacgatattttggatgtattggccgatagaatcggtaaatgagttcataatcagcaccgtcgggcctgcaataagcataaagatcattaaaatagccgcgagcgccatgttggtattgcttaagtatttaatccctttgccgatgccgctccacgcagaaatcaaaaataacacggtcacgacagcgatcaggatcagctgaacggaaaatgttttcggaatgccgaataaataatgcagaccgccgttgatctgagtcgctccgagccctaagcttgtcgccacaccgacaacggtcgcaaacacggcgatacagtcaatcgctttgccgatcggcccgtttactttatcgcccaaaagcggtgtcagtgtgctgctgatcaaaccgggcgcgtcttttctgaattgaaaatatgcgatacataaagcgacaaccgcatagatggcccaagcgtgcagcccccagtggaaaaatgtgtaccggagcgcatcacgaaatgcttggggcgtttctgtttcacctgagggagagctgatggcgtaatggctgatcggttccgcagccccgtaaaataccaaaccgattcccatgcctgcgctgaaaagcatggcaaaccatgataataagccgaattccggtttttccccgggttttccgagttttattgtgccgatcggacttacaatgagaaagagacagaaaccgacaaatatagaaacgaccagcagataataccagccgaaagaatccgtaataaatttttgtgccgtatcagtgacttgctgcaggctgtcaggagaaatggctccccataaaaccgcagcggctgtgatgacaatcacaatccaaaaaacactggagatgttcttcttcaaacgttctcaccctctgactatttttttcaatacgccattttgttttagtatggtcgtacgattgcagatcaatcctttcttcctattccctcaatcaggtgaaacaaaacgcagaaaactctatcatgtttttggtcaattatcaatggggacgctcaggtaagtgcgctttaaactatttagagcgagcgtgagaaacgtcctgcattcaaaccggcgagacgccccgtgacaaaggctgaagtgatattgtagcccccggtatagccgtgaatatcgagtatttctccgcaaaaatataagccttccattttttttgacgccatctgtttcggctcaatctcttttacggaaacacctccgcctgtgacaaacgctttgtccaaagaaagcgttccgtcagcggcaaccgtaaattgtttgcagtctttgacaaaagccctgaattgatccttcggcaattccgtaaagcttgtctgcggatcaagaccgttccgttccagaagaaaaagcaggtaccgttcctgcatccacggcttcagcgcatttttgagcgcttttttcggtgcgtctttcagttccttgtgcatcttttgaaataactcttcctcgttgatgccgggaaacagatcgatgcggagtttgacctctggctgctttttcagttctttgacgacaaactggctgcagcggagaatggcggggcctgacaagccgaaatgggtaaacagcatgtccatcacgtgtgtgacgattggtttgccttttttattcagaacgctgacggccgcgtttctaagagacagcccctgaagtgttttttgtttaataaacggttctgacgacgtaaccggcacttccgtcggaaagagttcggtcacggtatgaccggccgcttccgcccatgcatagccgtctccggtgctgccggtatgcgggactgattttccgccgaccgcgataatgacggcgtctgcgttaatgtgttcgtcattgtttgtcgtaatgcctgctgtcctgccgttctcgtaccgcacttctttgattttttcatttgtacggatggtgacattcagttgttttaatcggttcaaaagcgcatcgacaacgctttgtgctttgtccgtcaccgggaacatgcgcccgtggtcttcttctttcagctgaatgccgagtttttcaaaaaaggcgatgatatcttcattattaaattcggaaaacgcgctgtataaaaagcggccgttgccggggatgtgtttgatgatttcttcaacggggaggcggttggtcacgttgcagcgcccgccgccggaaatcgccagcttccgtcccagcttgtttcctttatcgattaataatacgtccgcgccttcttcgcctgccgcaatcgcagccattaaaccggacgggccgccgccgatcacaatcacgtcataatgtttcatctttcatcaacaactttctttttcacgtataataggcggaaatgtccgctttctgctattatagcgaaagaaagggaatccttaaacgtattttgttttttaaagagttttcccaaaaagtttcccgctgtaattattaccgtctaattgcccagttgtgttaaaatagaaaagttgaatcttcgtagaaaatggtgatgaggaaacatgtcaagcaaattgttaaggggcacgttcgtgctgacgctcggcacctatatatcgcggattttagggatgatttatctgatcccgttcggagcgatggtcggagcgacgggcggagctttgtttcaatacggatataatcaatatacactgtttttaaacattgccacgatgggatttcccgccgcggtttcaaaatttgtctcgaaatataattccaagggagactatgagacaagcaggcggatgctgagagcgggaatgtcggttatgctcgtaaccgggatgatcgctttttcaattctttatatttcggcgccgttttttgcggaaacatctctcggcggcacgagtaacaacggacttacgattgaccacgtcgtttatgtcatccggatggtgagtctggcacttttggtcgtgccgattatgagtcttgtgcgcggttttttccaaggtcatcagatgatggggccgacagccgtttcacaggttgtggagcagcttgcccggatcatctttttattgggcgccacgtatttgattttaagagtgatcaacggcggccttgtcatcgcagtcggatacgcgactttcgcggcgctgatcggatcattcggagggcttgtcgtcctttatatttactggaataagcggaagggcgatcttctggcgatgaagccgaatctcgtcccgtctgcgaacttaagttataaaaaaatgttcattgagcttttcagttatgccgctccttacgtatttgtcggactggcgattcctttgtattcttatatcgatacgaatacgtttaataaagcgatgattgcggcaggccataaggatatcagccaggacatgcttgcgattgtcactctttatgtgccgaagcttgtcatgatcccggtttctctggcgaccgctttcggtctgacgctgattccgacgattactgaatcgtttacgagcaggaattataagcttttgaaccagcagattaaccagacgatgcaaatcattctgtttttggttattcccgcagttgtcgggatgtccgtgttatcgggtccggcctatacgttcttctacggctctgaaagtcttcgcccggatatcggacaggatatattgttctggtacgcgcctgtcgcgattctgttttctctgtttaccgtaaacgccgcgatcctgcaagggattaataagcagaaatttgctgtcgtgagccttttcatcggcgtcattataaaagtggtgctgaacgtgccgctgatcaagctgtttcagggagacggggccatcttggcaacggcgctcggttatatcgcttctcttctgtacggttttattatgattaagcgccatgcgggctattcgtatacggtacttataaaacgggtcattttaatcgcagtcctgtccgtcgtgatgggagtcgcggtcaagctgactcaatggctgctcagtttctttgtaacataccaaagcggccaggtgcatgcggcgattgtcgtctttgtctgcgccgctgtcggcggtgcggtgtacatgtttgccgcgtaccgaatcggatttttacagaaaatgtttggaaaccgtctgccccgcgttttaaggagaggcaggcattccgtccattgagaaataatgaatagtccgcttatcgcgggcttttctttttaaaggagaggatcaggatgagacttgataagctgcttgccaacagcggattcggctcaagaaaagatgtgaaaaaaatcgtcaaggccggggctgtcatgattgacggagagccggcgaaagatgtgaaaacccatgtcgatccggaaaaacaggacatcacggtatacggagagccggcagactatcgtgaatttatttatgtcatgatgaataagccgcaaggagtgctgtccgctaccgaagacagccgccagcaaacggtggttgatctgctgacgcctgaagaacagcgatttgaaccgtttccggcaggacgtcttgataaggatacggaaggctttttgcttctgaccaatgacgggcagctcgctcatcgcctgctttctccgaaaaagcatgtgcctaaaacatatgaggtccggttaacctcgcctctgtcaccggaagacatcgttcatctggaaagaggcgtcgtcattgaaggaggctataaaacgaagccggcagccgttgaaatcattacagaaagcccggatgaaacggtgattcacttgaccattacagaaggcaaatatcatcaggtgaagctgatggcaaaggctgtcggaaatgaagtggcttatttgaagcggctttcgatgggggctgtttctcttgacccggatcttaaaccgggagaattccgcgagctgactgaagaggagctcgaaacgctgagaggcgctgaagtgtaatcgatatcagaaaagcccaaaacagatttgttttgggctttttatatagaggaacaaaaaacaaggcaaagacgctgctttgccttgcagcatgtcaggccgaaaagggccttatgtaattgttcgcttaagatgtaattttcactttttttcgtgttgtctcccacttgcctcggctaggactatgaacaagatcattgtatgctaacacatttaagtctcgctgaatggttctaggtgtaatgccgaattcatcaaccagttcctgtgttgtcacaaggcctttttcctggatgaacatgtaaactgatttaatccgagtcagcatacgatttgttgaaggtttcaaaaaaccactccctatcataagatcggatggacttgatataccacaactttcgactctaaaacttcgtacgaataagcaacaaaggatgacattctgttttttctcttttaactgcctccattatacacgatatggacaacatgaatctaggaataagcgcagataattttttccaaatgggtgccgccttggtgcattactatgctcggtccgcttttattattatggaaactgaaactttttttatacatgtccgtatgaaaacgggggagtgagaagtttgggagaattattgaatgcaaacattgtctgcgccggttatgctgacaggccgaaggtgatttctgatgtatctctgtcagtcaacgctggtgaaattgccggtttaatcggagcgaacggcgcggggaaaagcacagtgataaaggcggttctcgggctttcccgggatatagaaggcggtattgagtggaatgattcatcttatgcttacataccggagcgtccgagtttttacgatgaactgacgctttgggagcatctcgagctgaccgggtcattgcggggtatagaaggggaagaatgccgtgagcgggcagggcggctgcttgaagagttttcgctgacgtctgtaaaacatgatttgccttccggtttttcaaaagggatgcagcaaaaattgatgctcatacaggcatttttggcgaagccggatatttacatcattgatgagccttttatcggacttgatccgatctcaacgaagctgtttaccgacatgctgattgctgagaaagaaaggggcgcggggattttgatgtgcactcatgttctggatacggcggaaaaaatctgcgaccggttttatttgctggatcagggcgctctgcttcttcaaggcacgttagaggagcttcaggaaaaaacggggagccgttcactgctggattgcttttattcagcggttcggagcagtcagcgatgaccgggcgggctttgttttttcaaaggctgtttcattattggcggtatcaatggaaggtgtttcagacggtcattgattggacggtcgcgctgtatatcgttcttcccgctgccgcatttgccgtttatcaatatgctgaatggctgaacggcagggggcttcttaatggagctgcaggagtattaggatggggctggctgtatgtattcagtgccctgctgttgtgcacgggttttattcatacctttttgctggaagcggatcacgtatttttggtgcatgcaaaacatctgatgcaaaagctgaaacggtacgcgcttttgtattcgatgttcctttcccttatcaaatggggtgcgcttgccgtattgttatttcccttatggcgccagtacggtgactgtaccttaccggcatattcgggtatgttttgctgtctgttcggcttccatactgcaatattagcggtgcaccggcacagaaaaaacagcaggcggacattcgggaatcaggcggcgggctggctgaaagtgatggttctgatggcgggtgcgttttttatgatcgtctttgccgccgaatggtattggctttggccggcgggatgtatattgttcatctgttccgctcttttgacttggaaagggacggagacattatcagcctttgaggaagaagtgcttgaggagaacaggcgcaagctttctttcgcagcctctgttttgatgctcagccatgatgtgcagctcccgaatggtaaacataaagggcggagcaagccgtttttatatccccgctcaaagcacatctttacaaaacggtcggcgtatacggcgtggaaagaattgttctttaaagtgctgatccgaaacggcgggtatctccggcagctttaccttttaaccgcggcttttacggctcttattctcgttcttccgctcttagtgaagccggcagtcctcattttgtttgcgatcgtcagccgctatgccgcgtcgcttatatttgaccggatcacggacaaaccggttttaagcggtatcaagagagacagtgatgactatttcagggcgcgaaacagcgcattaaccgtcatccaagtcatctgttccgcctggtgtctcattgccgcgattctttccgttctttatatgtgaaaatccctttccgaaaaaggaaagggatttttcttaatgtccgttcaaaataaaaagctgaataaaaaacagcacggcgaagatgatgactaaaggatggatttcgcgccattttttcttagctgctttaacaagcggatatgaaatgaagccgagtgcgatcccggttgaaatactggacgttaaaggcatcgccaaaatgacgagaaaggccgggaacgcttcatcaagctcattccagcggatattcgataccgcacccatcatcaggctgccgactataatcagagccggtgacgtaatcgcggacacttccgataagacgctgacaagcgggctgaaaaacatggaaacggcaaacataacggcaatcgtcagcgccgtcagacccgttcttccgccggccgccacacctgctgaagattcaacgaacgcggtcgtcgggctggtgccgaagatgcttcccaccgtcgtagcggtcgaatcagccaacagcgctcttctggcattcggcagctgattgtttttgatcaatcccgcttgttcggcgacaccgatcatggtgccggtcgtgtcaaaaatcgtaacgagaagaaaagaaaacacaacggcgtacagaccgtgatgcacgacatccccgagggctccgaacggatttgtgatcaaaagcccctccggcaggtgcgggaaggacatgaatcctttcgcgaaatggatctgtccggtcaaaaaggcaatgatagcggtcagcgccattccgatgaacagagccccgtttacattcagcaccatcagtacaatactgatgataagtccgataagcgttaaaatgacggcgggcgaatgaagatcgccgagtgcgaccagattagatttatcagccgtgatgattccggattggcgtaagccgataaaagcgataaataagccgatgccggtcgtaattccgtattttaaattgtccggaatcgcttctataagttgttttcttaaaggcgttaacgataaaataataaagatgactcccgcgataaaaacggcgctgaaagccgtctgatacgtaatgccgctgcctgtgccgacaacgtgaaaggcaagatacgcgtttaagcccatgccgggggcaatggcgatcggaaaattcgcagcgagagccatccataaagttccgacaatggaagcgataatcgtcgcggtgaacacctggtcaaacggaattcccgcattggaaaggatcaccggattgacgacaatgatatacaccattgtgaaaaaggtggtcaatcccgcggtaatttctctttttattgtcgtttgatgcttgtcgagatgaaacataagtacctccaatgacgaacattttttcaaaacatcatctatattattcgttttatcgacattttgcaagtctttatcaagaaaggggatttgtgatgaactgggaagttgaagtcatcagaaacaaagaagatctgatccgtgacacgcagaaatttttgcagatcaacagcgtaatggacgaatcaacagccggtcccggccggccgtttggagaaggcgtcaatgccagcctgacgtcactgctggaattcggtgaaaaagaaggcttcaccgtgaagaatcttgatggctatgcgggccatattgaatggggaacgggtgacgaaatcgtcggcgttttgtgccacgtcgatgtcgttccgcccggagacggctggacgagcgatccgttttcagccgatatcagggacggccggatatatgccagaggcgccatagatgataaagggccgacaatggcggcgttttatgcgctgaaaatcgtcaaagacatgcagctccctttatccaaacgcgtgagaatcatcatcggaacggatgaagaaagtgattggagatgcgtggatcactacttcaaacacgaaaaaatgcctgacatcggctttgctcctgacgcggattttccaatcattaacgcggaaaaaggaattatagatgcatcactgcgcattgtaaaaagcgcttctgacaaagacgcaaaaaacgggcttctgtcattccgttcaggactgcgcttgaacatggtgccggatgcggctgaagcggttattgaaggggacggtcttgatgccgtgcacgcatatttcagcaaatggcttgagcagtcaaaaacacagggtgaagcagtttcggaaaatggaaaactgacgcttcgggtatacggaaaatcatgccacgcgatggaaccggataatggtgttaatgccggcttaaagcttgctgaatgccttaacggaacagatctggatgaagccggaaaggactttgtcaaaaccgtcagtgactattttttaaatgatacacgaggcaaaaagctgaaaattgattgcagggatgacatcagcggagagcttacattgaatgtcggcacctttacatacagaaagggtgaggaaggagaactcggcatcaacatccgttatcccgtcacttcagacagcaaagtcatccgtgatgcttttacgtctgctgaagaattccggcttgaagaatttaaagacagcaaaccgcaccacgtttctgccgatcatccgctcgtaaagacgcttcaaaaggtttacgaaggacagacgggaaagaaagcggatctgatttcaatcggcggaggaacgtatgcgagatccctttcggcgggcgtcgcgttcgggccgctgttccccggccggcctgacagcgcgcatcaaaaggatgagtatattgaaattgatgatcttctccggtcaaccgctttatatgccgaagccatttatgagcttgccaagtgataataaaaagggacgccgaaagcggcatccctttttatcattcaaatgaccataaatccgttgataaataacgttctcccgtatcggccgtcatacagatgacgatctgttcggaagggagtcgttttgcggtttcaatggcggcgaagcaggcggcgcctgaagacggtccgacgagtatgccttcttcccgggccagacggcgtgttgtcgtatacgcatcttcatcagatattttcatgatttcatcgtaaacgtcctgattcagtatgccgggaataaatccggggcttgtcccgacaagcttatgagcgccgggttttccgccagacaggacgggagaccccgcgggctcggcgacatgaacaatcatatccgggaaaagctccctcagcgtttctccagttccagtaatggttccgcccgttcccgccgttgccacaaaagcaccgagcggtctgttgagctgctgaacggcctgatagatttcaatggctgtcgtttttcggtgggcatctggatttgcgccgttatcgaattgcatcgggataaaacttcccggaatctgttcggcgagttctttcgcttttttgatgctgccgggcattctttccgcccccggtgttaacacaacctccgcgccgtacgctttcaggaggttgatgcgttctttcgtcatcgtgtcaggcatgacgaggattgccttgtagccgcgcgctgccgcgttcatcgccaggccgatgcctgtgttgccgcttgtcggttcgatgatgacagagccgggttttaaatgcccgctgttttccgcctcaatgatcatattgtaagccgctctgtctttgacactgccgctcgggttaaacgattctaattttaaatagacctgcgctgcatgttctggctgaaggcgattgagctttacgatcggtgtgccgccgatcagctccgccgtgctgtttacgattttcaaggccggctcattcctttctgtataaaacgttcggtacataatatcctatcataatgagcggacagggttctcctctccgcttatccgttttataataacaccataaccaaagagggggagatcctcgtatgaaagcttcattgccgcattattttatcggcattccgattccggctgacattgctgaaccgatttgggaagcagccaaaaaggagccggcgttaacattcaaaaaatgggtgcacccgcatgactatcatattacactcatttttctcggagccgcggatgaagaacggcttgcgaaattatcgtcgctgctcgcagatgctgcgtcggcagcgcagccgtttaccgtacagtttcagcatctggatattttcggcgaccgcagacagccgagagtgcttcaccttgagcccgaacggaatgaactgctctttgatttgcgggaaaaaacaaaacaggctgttttgaaagccggttttcaagtggaaaaacgcccgtatcaccctcatatgacgatggcgcggaagtgggcgggagaccggccgtttcctgacgatgtgccgtttgaaagcggcagggtgcaaagtgccgtcagccggttttccctgtttcagacccatcttgaccggtcgcctaaatacgaagaaattgcacagtttcaattgacataaacaaatattcggagtggagaaatcacatggcacagatcatcaaaattcacgactgcatatccagatatgaacttgatccatatcattatatgaaccagtttatccggctgaagaaagaacgctgggaggcgcttcttgaagcgtttgaccggatgacggaagaaaaagaaacggaaacggctgcaggcggggaaaccgatcaagcgccagccaggaaaaagttttccttaaaaaagagaaaagaagaaaatacggccgatataaatgaaaagaggcaccaatggtttgatgagccggagggagaagaggcgctgttcgggaatctcccgactcgaaagtctgagctcgcgccttttttcaaagatcagctgtatgactttcaattaaaatgggcgagctccacgctttctcaaaagtcagagctttcgcaggcggtcaaaagggacgggatgttaaaaatgctggctcaaaagctgcccgattcctattttgtgatgtatcatccggttctgcaaattcagcaggcgtccgtcgaactgagcatgatcatcatctcgccgctggagattttctgcgccgcttttatggaagcggaagaggacagcgtatatatcggatcaaaacaccgtttttgggaagaaaggggctccggcagcacgcgccaagtattgaatccgtctctcagcctgcaccggacgggctcggtcgtttcgcaaatcgtaaaagaaaagcaggccgacattcccgtgcggaagcttttgctcagcagaacgtcttatattgattatccggagccgccgtacgggctggaaatagctgataaacggactgccgcagagtggctggaaaagcagcagaaaaatacggcgccgatcaagcaccaccagctcaaggcggcgaaggctcttttgtcttacggcttaagcgattcaagccggagacaggaatggcttgattaaaacggacgtttgccggctgtctcttcatctatgaagcaggtgaaaacaaacgatgagtcaatggttttttattattaatccggtctcaggaggcgggcggggccggcgtgtctggaaatcagttcaaaaagagctgaacaggcgcggggtcagccaccgttcttttttgaccgggcatcccggacatgcggaagtgctggcgagacagatttcaatgatgcaggatcataagcttaagcggctgttcgtcatcggcggtgacgggacgatgcatgaagtcattaacggactgaaaggaacggatcagattgagctgacctttgtgcccgccggttcgtacaatgacttttccaaagggctcggtattaagaagtcggcgctcctccaagaaatcaaaagtctgcaccgcccgctcacacggaaattttttgcgggaaacatcaacttttttcatgacaaagcgcaatcactttattttattaaccacctgtctgtcggcttcgatgcctcagttttgaaggcagcggcgaattttccgttatcgcgcgttcttcggtttttgcgtctcggctttgtgatttacccgctcgcgcatttacatacggcctcggggtttcagccgttcagatttgtttgcacggcagacggccagaggcgagaattccgcaatgtctggtttgtcatagcggctaatcacccttattacggaggcggcatgaaagcggcgccttcagcaaatccccgtcaaaaccattttgatattgtcgtcgcagaaaacctgtcctttttctcgctgtatcgttttttatgggcgatgagcttcggccggcatatcaaaatggacggagtgacgatgataaaggggaaggaattcgtttttgaaacagatgggaaaattccgtttcacgctgacggcgagctgatcggaacgacgccgtttcggcttatgccgggcggtgcgccgttgaaaataaaaacataataaacaaatgaaacccgtcaaatgttttacggcaaagagcggttcgcggcataaatcttcagaattcacaggtgttcttgctagttttgcttgacgaagtttgtgctgtagcgctaaaatttataggacggctattgattagcatatgagactctcaatagctgtcttttttattctcatgaaattgtttatgacaggccgctccgccaatagagaaaggctggaggcctattctaaaatattttaagaaatgatgggttgaacattgatatgaactggttgggacaattactaggtagcgattgggagatcttccccgccggaggagctacaggagatgcatattatgcgaaacataacggccaacagctttttttaaaacgtaatagctcgccctttttagccgtgttatccgccgaaggcattgttccgaagctggtttggacgaaacggatggaaaatggagacgtcattacggctcagcattggatggcgggcagggagctgaaggcaaaggatatgagcggacgcccggtggctgagctgctccgcaaaatccacacatcaaaagctttgctcgacatgctgaaaagattgggaaaagaaccgcttgatccgggcgcccttttgtcgcagctgaagcaggccgtctttgccgtgcggcaattttcgccgcttattcaggaaggccttgcttatttggaagctcatgtggatcaggtgcaattcggtgaaaaagtcgtttgccattgtgatgtgaatcataataactggcttctgtctgaagacaaccagctgtatttaatagattgggacggcgccatgatagctgatccggccatggatctcggccctttattgtatcattacgtcgaagagccagcgtgggacagctggcttgggatgtacggcatgaagctcacggaagggcttcggctgcggatggcgtggtacatgttatcggagaccatcaccttcatcgcctggcacaaatcaaaaggaaacgacaaagcgtatcatgatgccatggaagagcttcatgccctgatgaagcggattgtcaagtagtcaggagtacgaatccatctgctccacccattgggacaaatggttttggtgctcctgaatatgcgtgtcgatggaatcggccgtgatgccggactggctgtagcggtagacatcctcgagcacgttttttatatttgaatcaagcccggtgttggccatcagtgatttgatgacgcgctccagctgttcatactcggcaaccgtgccgcagcaatccaattgatggtcggccagtatgtcctttaataaccggacctgatgttcgcttgttaagcccatgattcatatacacatcctttctgtgtcatacattgtgcaaagcggtgcggttttatgcatcacatgagtgttccggaccggggagcctctttttttatgcagccggcgcctttaaaagacgcttgcggctctttatgtttcatggtatgttgttactcgaaattatagatagaggtgtcaatcatatgagaatgcgccataaaccttgggcgaatgattttctggcagaaaacgctgacatcgccatcagtgatccggcccagtataaagggcggtggaacacggtctttggcaatgacaacccgatccatattgaagtcggtacgggaaaagggcagttcatttcaggaatggccaagcagaatccggatatcaactatatcgggattgagctgtttaaaagcgtcatcgtcactgccgtccaaaaagttaaggacagcggggctcacaatgttcgtttgttaaatatagacgcggaaacactgaatgacgtatttgaacggggagaaatcaagcgcgtatatttaaacttttctgacccgtggccgaaaaaccgccacgaaaagcgccgtttaacatttaaaacgttcttgaaaaaatacgaagaagtgatgggcgaaacaggtgagattcatttcaaaaccgataaccgcggtttattcgaatactctctgaaaagcttttccgaatacggcctgcttctgacggaagtcagccttgatctgcacaacagcgatccgaagggcaatattatgacagaatacgaagaaaaattctccgcgctcggccagccgatttatcgggccgaagttgaatggagaacaaaagacagactctgatgcgggagtctgtttttttatgccgccatttgctaccattacatcaggagggatcaagatggagacattgaatattgggaatatttcattaacatggctggacggcggtgtaacacatatggacggcggagcgatgttcggcgttgtcccgaaacctttatggtcgagaaaataccccgtaaatgacaaaaaccagattgaattaagaacagacccgattctgatcagaaaaaacggcctgaatatattggttgacgcgggtatcggccgagggaaattctctgataaacaaaaaaggaattacggcgtaacacaggaatccaatctgaaacaatctcttcgtgacctcgggctttcttgtgaggacattcatattgccgcgatgacccatcttcattttgaccatgcatgcggcctgacggagtacagcggagaggagcttgtctctgttttcccgaatgcccgcattatcacttctgcaacagagtggcgcgaaatgagaaatcctaatatcagatcgaaaaatacatattggagagaaaattgggaggcggtacaaggtcaggtcgaaacctttgagaacgagtatcagctgacagaaggcattacgatgcaccacaccggcggccacagcgacggccacagcgtcatcgtcttagaagacggtggggaggcggctgtgcattttgccgacctgatgccgacgaatgcgcataaaaatccgttatgggtgctggcctatgatgattatccgatgacctctattccagaaaagcagaaatggcagacgttcgcggcagaaaaagacgcctggctgattttctatcacgacgcgatttacagagcggtaaaatggggagaagacggcgaagtggctgcatctgttaaacgggagaaaaaataagcggatcgatgatttgcctgtatgaatttcgggaataaaagcaaacctaagacaaattgctttgaaaggaagagacaggtgaatcaatttcaagtgacgaaagatggagaaatcaaaacaactctgcgcggattagaagtgctttctacgccttttttaaataaaggggtggcctttacacaggaggaaagaaaggaactcgggctcgagggctttctgccgccgaaagtattgacaatcgaagagcaggcgaggcgggcctacgaacaattcagttcgcagcctgatgagctgagcaaaaatgtctacttgaccgctctccatgaccggaatgaaacgttattttacaggctgttaaatgatcatttaggcgaaatgctgccgatcgtatatacgccgaccgtcggcactgcgatccagcgttacagccatgagtacagaaaaccccgcggtctgtatttgtcaatagatgatcctgaaggaatgcgcgccgcatttcagcagttcggaaaaaatgaaaacatagacttaatcgttgccacagatgcggagggcattctgggaatcggtgactggggcgtcggcggcatcgccatttctgtcggaaaactcgcggtatatacggcggcggccggaattgatccgtcacgagtgcttgcggtcgtattggacgcggggacaaatcaggaaagcctcttaaatgacccgctgtatgtcggaaaccagcattcaagagtgcgcggcgagaaatatgaccgctttattgatgagtatgtctcgcttgcccgggaaacattcccgaatgcgctgcttcattgggaggatttcggtacggctaacgcccgcggcatattaaaacggtataaagataaagtctgtacgtttaacgatgacattcaaggaacgggcgcggtatcgcttgcagctgttttagcgtgtgcaaaagcatcaaaagtgcctttaaaagagcataaagtcgtcgtcttcggcgcgggaacggccggtatcggaattgctgagcagctgcgcgaagccatggtgcatgacggattaagcgaagaagaatcctacagccatttttggtgtatcgacagaaacggattgttaacggatgatatgaaggacttgcgtgattttcaggttccgtacgcgcgccctgctgatgaagtgaaagagtacggccgcagcggtgaaggcggatcaattgatctggcggagacggtgcgtcaggccaagccgacgattctgatcggcacatccaccgtatcaggcgcatttacggaagaaatcgtcaaagaaatggcctcgcatgtcaaacggcccgctattttgccgatgtcaaacccgacgacattatcagaagcaaaacctgaagatttgattaaatggacggaaggccgcgcgcttgtcactacgggtagtccgtttccgcctgttgcgtataacggcgttacctaccatatcggacaggcgaacaacgcgctcgtattcccgggactcggactcggcacgattgtgacaaaagcaaggctcattacggacaatatgttcgttgcctgcgcgaatgccatcgccggtatggtggacgtcggcaagccgggggcgccgatgcttccgaaagtggaggatctcaggacggtatcggcaactgtggcggtagctgtagctaaagctgcgattcaggacggtgtagcggaaacggaacccgaggatctgatccaagcggtgcaggacgcgatgtggcaccccgtatataaacgaattcggccgatgtaaccgaataaagcccaaaacgctgatggttttgggctttattttttgcttgtccgaattatgaggcgacagaatcaatgacatcgacaatctggcctgtttttgcattgaccataacttcatattgctccagttcgccgaatgccgaacgtgtcacgccggtcttgtatacctggatggtttctccgtttacctggtagggctcgggctctgtgtaaatccatgatccgtctatcggcccgcgctgtttaaaagccgctttcacgatacggagcgctttttctgaagagatataaggtttcatcgcatactttttcactgcgatggcagcgcataatccgactcctgcacctaagagaaaatgacgtaatttcaatatgaagcacctccaattatgtcgtagtttttattatacagaagatgccagacggtgttaagtaaagcggcggttttccagcccattcaatctgagcgcttggaaaacggttgtttttctaataaaataaaagcattacatagaaatgaggggaaaatatgaatgaggaaacgaaaacgcttttccggacgctgacgcagcttcccggcgcaccgggaaatgaacatcaggtccgctcctttatgaaacgggagcttgcgaaatatgcggatgacatcgtgcaggacagactcggaagtgttttcggagtaaggcgcggcgctgaagatgcgccgaccgttatggtagccggccatatggacgaagtcgggtttatggtaacgcagattacggataacggcatgctgagatttcagacgctcggcggctggtggagtcaggtgctgcttgcccagcgcgtcgaggtgcagacggataacggaccgattatcggcgtcatctcaagcatcccgccccacattttaacggatgcccagcgcgcaaagccgatggagatcaaaaatatgatgattgatatcggtgccgatgacagagaggacgcggtcaaaatggggatcagaccgggacagcaggtcgtgcctgtctgcccgttcaccccgatggccaacgagaagaaaatattgtccaaagcgtgggataaccgctacggctgcgggctaagcattgaactattaaaagagctgcacggaaaagacctgccgaacaatctgtacgccggggccaccgttcaggaggaagtcggcttgagaggggcgcagacagcggccaacatgattcagcctgatctctttttcgcgcttgatgccagcccggcaaatgatatgagcggcgataaggagctgttcggccgtctcggcgagggggtgctgctccgcattctcgacagaacgacggtcatgcaccgcgggatgagagagttcgtccttgatatggcggaaacgcacaatatcccttatcaatatttcgcttcaggcgggggaacggatgccggacgggtccacatatcaaacagcggggttccgtctgccgtcatcggcatttgttcaagatacattcatacaaatgccgctatcatccatgtcgatgattatgccgcggcgaaagaaatgctcattaagctggtcatggcgagtgacaaacagacggtcgaaacgatcagagaaaatgtgtaaaaaaataagcaggaccgcataaaggcggcctgcttattctgtttcaaataaataagagagtgctttcatcgcttgattgacggtttcgaccgtgatattcgcttttccggaaagctctttcagcggatgatgaagttctttcggacggatgagaatgagcggctttccttttgcgatggcataagaagcatccatcgcggtattccactgcttatatttctcgccaaacagggcgatcacaaaatcggctttttccatcagcacctctgtacggaaattgttgatatcagaagctctggcgtcttttaaaacagaatcgggctgcacgcccataatctcttctccgatattgtctgagcgttcatggttttccatcgggccgacaaacgtaatcggcaggtccagcgctgttgctttttgcttgatctcgtcccgccaattactgtggatttcacccgctaaatacacgacaaactgcatcttttgcccctccttatgtacatattcagattttcgtacggctacaagcaaaatggtaaacgaaacttgcttgataatgcaaatgaaatatgataatgatattgcatatagttggtcttgccgtaaacagtctggtatgatccaattggacaaacatcagcatataaaaaactcataatccagatggaggaatgacaatgaaaaagattgaaagcacggaagaattgcaaaaagcggtacaagacgattgggcggtatttatgttttcagcggattggtgcccggactgccgctttgtggagccgtttctccctgagctggaagcggactttcctgaattcacttattactacgtagaccgcgatcaatttattgatacatgcgcggaatgggaaatttacggcattccgagctttgttgtgtttaacggaggaaaagaagtgaaccgcttcgtcagcaaagaccgtaaaacaaaagaagaaattgagcaatttttaaccgattcccttgctaaagcataaaggaggccacgggctttgaaaatgacgtcaaggaagctggcggatttattaaaacagcgcctgcagcacgagaaccgatccttcttttttgacagagaaaaagacaccctccgtgttgaggatcaaacgaccaaaaaaggcatcacattggagctcccgccgatcattgcgaagtgggagacgaaaaaagaagaagcgatcgacgaaatcgtctactatgtgtcagaagcgatggaggcgatggaaggaagcggacaggagatgtccggaaaggaagccggtatctatcctgtcatccgctccacgtcatttcccgatcaaacgagcgacggcattccgctcgtgtatgatgaccatacggccgaaacgagaatctactacgcgcttgacctcggcaagacgtaccgcttaattgacagccgtatgctcgagaaagaaaactggacaaaagaacggatcagggagacggcgtcattcaatctccgctctcttccttcagttgtgaaacaggatacggttgcggacaattatttttattttttcagggcgaatgacggctatgacgccagccggattctcaatgattcgattcttcatgaatacaagcaggccgctgaaggcgaattggcgatttccgtcccgcaccaggatgtattaatacttgctgacattcgaaatgaatcgggttatgatattttagggcaaatgtccatgagcttctttgcaagcggcacggtgccgattacggccctttcatttctgtataatgaaggcagactggaacctgtgtttatcatggcgaaaagccggccgaaaaaggattagaaaggatttttcttatgaacgctttttacaataaagaaggtgtgggagatacgcttctgatctctcttaaagatgcggcacgcgaagaaatcgcctatgaaagagaaggcgatgtcatcagaatctttaacaaagaaacaaaagaaacgacgggctttaacatttttaacgtgtcttcttacttacagattgaggacaacggccccgtcgctttgtctgagacattcgttcaggatgtgaatgaaatactgaacagaaacggcgtttcagaaacgctgacggttgacctttctccgaaatttgttgtcggtcacgttgaatcgaaagaaaaacatccgaatgcggataaactgaatatctgccaagtgaatgtgggagaggaaaccctccaaatcgtttgcggcgcgccgaacgtggacaaagggcaaaaagtcgtcgtcgctaaagtcggcgcggtgatgccgagcggacttgtgattaaagacgctgaattaagaggcgttccgtcaagcggcatgatctgctccgcgaaagaactcgctttgccggatgcgccggcggaaaaagggattcttgttcttgaagacagccgcgaggccggcgaagcatttcaattctaactcccataaataagcgcacagaatcgaatgatgtgagagaaagccgttaagcaggcctgcttaacggctttcttcagttgggagcttaatcttttctgagccgcccggcaatggtatactaaatatcgtcccagactactaaaaagggagttagagagtgattaaacatgagttggctgaataaattttttgacttatttttaggtgaaaaagaagaagagcatgaacgtgaaccaaacacgcatgcccaaatcccgaaacagcagataccggatcagccagaaggcaaattcacgcgcatggaagatcctaaaatatattacgaatatccgaaagggaatttccgcttccccgtcgttccggacggctataagcgaacagagcaaaaccaaagacagcgggaaaggcacgaacgccgccagccgtcccgggattatgccgccgggaaggagcaaaccgagcggaaacagcatacacataaagagcctgaaacggtgaaaaagccctttaaaccgtcatccattccttcaccggtttacggctttcaatctcagcacagcataaaaaaagcgcctaattccgaaaagcggcgtgaagagaacgtaacattgctttcagaggagcaatttgttccgccaaaagccggccaggaaacagaaaaagagcccgtcttcacaacatccggcataacaaaacagacgaatgaccggccagaaccgtttgcgaaacaagagacggaagaaatcccggccgttaaaaaagaggagcttcacaccgaggctgagaatgtaaaagagcaagtgtttgcagcagcagaaccgcagcagactgaagagcgggagcacacggaaagcgcggagtctgccggctttacagaagaacaagagcatgaacaaacccgcccgcagcctattaaagagcctgagtatgaagtatcccgaacggctgaaaacacagaggaacaagcggcgccgcaggaggaatatcaggagcctgagccggaaaaagcaccgccttttgaaaccgcggaagaaacggtgtatacatacacagaacccggatacgatgaggaagttcagccgcagtctgaagacaagcccgaatcagctgaaaccgacgcggaacaggaagcagactctcagcctgagtacaatgaagtcacgcggcattcagaccccgagcctgaacctgcaagcatcgagccggccgatgccccgtcccggcctgccgaagaaaaaacggagcatcaaggacagcctcagactgtgaaaaaagcggagcggccgaaagagcgcaatgtaccgtttaacgtcatgatgcttaaaagcgataaacacaagcaggcgaagacgccagagggcggagcgagctatgtctttccgaatctgtcgcttctggacgtaccgccggcgcaaagacatgacgaccaatcgtggattgaagaacagcgcgagcttttaaacgttacactgaaaaactttaatgtgcgcgcccaagtcgttcatgtcacacaaggcccgtccgtcacacgttttgaagtgcatcctgagcccggagtgaaagtaaacaaaattacaaacttagcagatgatattaaactgagcctgtctgccaaggatattcggattgaggcgccgatccccggtaaaaacacgatcggcattgaagttccgaaccgcgtaagcaaagtcgttgatttaaggcagatgatcagaagcgccgctttcaggacgaatccgtctccgcttacagccgcgctcggtgtcgatatttccggaaacccggtcgtcattgatttgaaaaagatgccgcacgggttgatagcgggtgcgacaggatcgggaaaaagcgtctgcatcaataccattttggtcagtctgctttataaggcggatccgagtgatgtcaaaatgcttctgatcgatccgaaaatggtcgagcttgcgccttataaccaaattccgcatttggtcagtcccgtcatcacggacgcaaaagccgcgaccgccgcgttaaaatgggttgtggaagagatggaacggcgatatgaactgtttgcccattcgggtgtgagagatatcggccgctttaatgaattaaccgccgatcataagacaggcgaaaagcttccgtacctcgtagtggtcattgatgagcttgccgatttaatgatggtcgcgccgaacgatgtggaagaaagcattgccagaatcgcgcagaaagcgagagcctgcggcattcatctgcttgtcgcgacacagcgtccgtctgtcgatgtcattaccggaatgatcaaggcaaacataccgacgaggattgcattctccgtctcaagccaggtagattccagaacgatcatcgacatggcgggagcggaaaagctgctcggaaaaggcgacatgctgtactgggaaaacggtaccggaaaaccggtgcgcctgcagggcaactttgtatccgacagagaaattgaccgcgtcgtctctcatgtcagaaagcagctgccgccttcttatttgtttgaacaggaagaactgatcaggcagggaaccgcccttaaggaagaagacgaactgtttcctgaggcgtgccaattcgtcgtggagcaaaacagtgccagcacctcaagccttcaaagaaggttcagaatcggttataaccgcgccgcgaggctgattgacatgatggaagccgaaggcatgatctcagaagcgaagggcagcaaaccccgtgaagtgctgattacggccgctgacattgctcaagaataagaatatcgttcatttttctcacaaacatggtatgatagtggatggaccatcaaaactgcatcactgtcacgcgctgaaatatcatgcggcaggtttaatcaaaaagaaagttacagatactgacgataacgtaaaaataaatggaagcgccgctgtgcgggcttttcgcccgcggcggtcgcaaaatgaaatgagcgtcatatactggggaacagatagacgtttgttggaggtacgattatgactgtttatcattttgttggaataaaagggacaggtatgagcccgcttgctcaaatcctgcatgatacagggtatcaggtgcagggatcggatatcgagaagcagattttcactcaggctgcccttgaaaaaagaaatatcccgatctatccgttcagcgccgataacatcaaacccggcttaacggtaatcgccggaaacgcattccctgattctcatccggaaatcgcaaaggcgctcgctgaagggattcctgtcatcagatatcataaatttttagctgaatatatgaaaaaatacacaagtgtcgcggtaacgggcgcacacggcaagacgtccacaacgggcctcttggcacacgtgatgcagcaggcgaagccgacttcgtttcttatcggggacggaacgggcagaggaaatgaaagcagcgaatactttgtatttgaagcctgcgagtaccgccgtcatttcttaagctatcagcctgattatgcgattatgacgaatattgattttgaccaccctgattatttcgccaacattgacgatgtgtttgatgctttccaaaacatggcgcttcaagtcaacaaaggcatcattgcctgcggtgatgacgagtacctgccgaaaattcacgccaatgtgcctgtcgtttattacggcacgggagaagaaaatgattttcaagcgagaaacatcgtgaaaaatacggaaggcacgacatttgacgtctttgtccgcaatacgttttacgatacgttctacatcccggcatacgggcatcacaatgtcctcaattccttagcggttattgcgctctgccactatgaagagatagacgtgaacatgattaagcgcggacttgaatcattcggcggcgtcaaacgcagattcaatgaaaaagtgatcggcagccaggtactgatcgacgactacgcccaccatccgactgaaatcaaagtcacgattgaggcggcgcgccaaaaatatcccgaacgtgaaattatcgcggtatttcagccgcatacgtttacacggacgcaatcattcctggatgaattcgcagaaagtttaagcgcggccgatcgcgtgtatctgtgtgacattttcggctctgcccgcgagaacgtcggcaagctcacgatcacggatcttcaggaaaaaatcgctaacgcagaactcattgaagaaaatgacacatccgtgttaaaagcgcatgaaggcgcagtgctgatcttcatgggcgccggagacattcaaaaatatatgagagcctatgaaaacgtcatagcgtaacgaaaaagcagtggggctctcactgcttttttgcgcgtgctgcaaagggatttaccgagaaacggagaaatagtatacatacagatctttcatatatgtttatcattttaagaattgggtatataccactatatcctgcattaaggaggtattagatgatcatcattctttacttaagcgtcgcactcattgccgttgcatttctcatcctcgtcatctatctgtccaaaacattaaagtccgtgcagatgactttaacaaacgttgcctcgactttagacggccttgaagggcagatgaaaggcattaccgcagagacaaccgagctgttacataagacaaaccgtctcgcggaagacattcaggaaaaatcagagaaattaaatacggttgtccatgctgtccaggaagtgggaacttccgtccagcagtttaatacatccataaagcaggcagcaggttccgttacggcctctgtaagagagaatcaggataagatcagtcaggttgtcacctggagccaggccgctatggaaatatgggacaagtggaagcaaaagaaaaaaacatcgctttaatcataagaaaaatccactaaggaggaatcataatgagcaaagatggaatcaatagtaaggattttttaatcggaacgctgatcgggggaattatcggcgcgacaacggcgttgtttctggcgcctaaatcaggtaaggagctgcgcgacgatctcggcagtcaggcttctgcgttaaaggataagacggacagaatgacggccgacgcgaaagaaaaaggctctcaatatgtcagcatcgccaaagacaaaacatctaatatcacccagctggtagctgatcagtcaggccagattatgaataaagtgaaggatttaaaagaccgttctaagagcacactaaccgagaaagccgaagagacgagaagcgaaatgcaggacacggcccaaagcatcaaggccgaagcggaagacgccggggaaaaagccggtcaggcaaatcgctgatcttcaataaggagagataaccgacatgacaaaacagctgatatcgtctgaagaagagttcaaaaatgccgttgagaaagaaaacaagctggtgtttttgaaacacagcacaacctgcccgatcagccaagccgcgtttcaggagtttgacgcctttgcatcggcgcattcggaagtgccttcttattacctgcaggtgcaggacagccggccgctttcaaactatatcgccgagacatacggcgtgaaacatgaaagcccgcaagtattcgtcattgcaaacggcgaagtgaaatggcacgcgtctcattcacaaatcacaaaaaacgcaatagagcagcacctttcataattgctggccgccggttgataccggcggttttttttttgaaaaaaactattgatcatttcagccggatcatgtaggatatcaatatataccgcttcaacgcataaaagcttaaaagcgttttggtgataaagccgaatgtgaaaaaatttattatttcatattcctattttcgcataactgtagtaagatgcatgttaaccattaaaataaaacatagcatagaagggatgaaaaagatgagcaacaaggaattagagagcctaagacagcaggcagacgcactaaacttagaaatccttaaattaatcaatgaacgcggagccgttgtaaaagaaatcggtaaagcaaaggaagcacagggtgtcaaccgatttgaccctgtcagagagcgtacaatgcttaaccgcataattgaaagcaatgacggcccatttgaaaactcaacgatccagcatattttcaaagaaattttcaaagccggacttgaacttcaagaagaggatcacagcaaagcgttgctcgtctcccggaagaaaaaagcagaagatacgatcgttgacattaaaggtgaaaaaatcggtgacggcgatcagagattcatcgtcggaccttgtgccgtagaaagctatgagcaggttgccgaagtagcggccgcagcgaaaaaacaaggcattaaaatcctgcgcgggggtgcgtttaaaccccgcacaagtccgtatgatttccaaggtctcggcgtagaaggcctgcaaattcttaaacgcgtcgctgatgaatatgacctcgcggtgatcagtgaaatcgtaacgcccgcacacattgagcaagcgattgattacattgacgtcattcagatcggcgcgcggaacatgcaaaactttgaattgctgaaagccgccggttccgttaaaaagccggtattgttaaaacgcggtcttgccgcaacaatttcagagttcatcaatgcagctgaatacatcatgtcacaaggaaacgaccaaatcattctttgtgagcgcggtatcagaacgtacgaaacggcaacgagaaacacactcgacatttctgccgtgccgattttgaaacaggaaactcacttgccggtgtttgttgacgtcacacattcaacaggccgccgcgatctcctgcttccgacagcaaaagcggcgcttgcgatcggcgctgacggcgtgatggccgaagttcaccctgatccttccgttgccctttcagactctgcgcagcagatggatatacctgaattcgagaaatggctgaacgaattaaagccaatgctgaaagtaaaagcataatacaacgttccgctctttaaaggccgcctcgcgcggctttttttcgtatcttcattttatttaattataaaatgaaagtgaacgttttcatcactgggaaaaacgtgtataatttcatgagagatatttaaatttgatgaataatgaaaaataatgtacactactgacttacgcttacaatcataaacgacagaatgcgaaatcgtacgacatttctttacataaagtgtttatgctatagataaggataagtgtatccagtaaaaggagtggtttcagtgagcaacattacgatatacgatgtggccagagaagcaaatgtcagtatggcgactgtttcccgcgtcgtgaacggcaacccgaatgtaaaaccgacgaccagaaaaaaagtattggaagccattgaccggctcggctatcgcccgaatgcggtggcaagagggcttgcaagcaaaaaaacgactacggtcggcgtcatcatccctgatatctcaagcattttctactctgaacttgcgcgtggaattgaagatatcgcgacgatgtacaaatataatattattttaagcaactcggaccaaaatcttgagaaagaactgcatctgttaaatacgatgcttggcaaacaagtggacggtatcgtatttatgggcggcaacattacggacgagcatgtcgaagaatttaagcgctctcctgtgccgatcgtcttggcggcatcagtggaagaacagggcgagacgccttctgtcgccattgattacgaacaggcgatttatgatgccgttaagcttttcattgataaagggcatcgcgatattgcactcgtctccggaccgatgcaagagccgatcaaccgttcgaaaaaactgcaagggtacaaacgggcgcttgaagaagcggcgattccgtttaacgagcaattcgtagcggaaggcgattacacttatgattccggtatggaggcgcttcaaagcttgatgggccttgaccggaaaccgacggcgattctttctgcgacggatgaaatggccctcggcattatccatgcggcccaagatcaaggtctttcgatacctgatgatcttgatattatcggttttgacaatacgagattgagcctgatggtccgccctcagctttcaacagtcgtgcagcctacgtacgatatcggcgccgtggcgatgagacttttgacaaaactgatgaacaaagagccggttgaagagcatatcgtcgaattgcctcaccgcatcgaattaagacaatcaaccaagtcataaaaaaacggaaaagcaagcttcactctgaggggtggaatcttgcttttttacttgagtaaggagaagatatgaaacgttttgattatctgacgcccgttggctttatgttaggctgtattattgtcgcaatcggtattctgtcagggacgggactggcgggaatcagttcatttttagatctgacttcttttttaatcgtcacaggcggccttgctgcggcgatctttatcagctttccgccgagggatttaaagaaaaccccttctgttctgaaacaggtattctcccgtcaggatgacaatgtgaaagagcttgtcagagtatttgtcagcctttcggagcaggcacgcaggcaggggcttctgtctctggatgaccaggcgcgtgagatcaaggatccgtttttaaaaaaagggcttttgcttgcgattgacggctgggacgaggaaacgatccggctggtaatggattctgagatcgccgcgatggaagaaagacacagaaaaggaagacgcgtttttgaaaaagccggtgatttcgcacccgcctggggaatgatcgggacgctcgtcggactcgttctcatgctcaaaaacttaaatgacccgcataccctcggaccgaacatggccgttgcgctattgacgacgctgtacggagcgctgcttgccaacttggtgtttatcccaatcgcggcaaagcttgaagaaaaaacggaaagtgaaattttcatcaaacaggtcatgatcgaaggggttgtcggcatccaatcgggcaaaaatccccgcaacctcgaaagtcagctcgttgtcttcagctcaagagaagactggcgtaaaggacagcctgcgaacaagaaaaagggcgctgtccatgaagcttagaaaagagcgttttgaaagaagaaacaaaccggaacattccggcggttcaccgagatggatggtgacgttcgctgacttgatcacgctcattctcgtgttctttatattgcttttttcgatgtcgcaaatagacgcggaaaaatttcaatctgccgtttcatcgattcatacaaacggcagcgggggtgaaccggcgtcatcagacaaagcaaatgaaaataaagaacaggatttgctcctgaaaaacgtgaagacatacataaaagcgcatcatttgagttcgaaattgacggcgaagcgcgatgagcgcggagtggttctggtgctgcaggaggccgttctgtttcagacaggaaaagcggatgtgctgaaaaacgccgagccggttctgcatcagatcgcggtgcttttaaaaacaattccgaatgacatacaggtagaaggccatacggacagccgccggatttccacctatcaatttccgtcaaattgggagctgtcgtctgcaagagcggcgagtgtgatccggtattttaccgcgaatgaagacttttccgccaaacggtttatctctgccgggtatgcggatacgaaacctgtgaaggacaacaaaagtcccggacatatgaaagaaaaccgccgtgtagaaattgtgatcaaaaaaacgacctcctcataaggtcgttttttattttgttttataccgctgctcagaccggatggcaaaaagtgctttttccacggtttgggcatttttttctgaaatttcttctttgcggggaatcggaggatataattgttcaggatcactccaaaaagcgggcaacgtgcagggggagtgcttctgccatttatcaatccatttctgcggtatgcgttccccgggatcaatccctttcatctcaagccaaatgcggctccatgctctcgggacgactctccaaatatcgtatccgccgccgccgaccgcgatccatctgccgctgcaatattgatgggctaatgaatgagcaagccgcgggatctcctgataaatggagattgtattggacaggtgtgtcaatgggtcgtaataatgggcgtccgcaccgttttgggtaagaatcacatccggcttgaaaaaagccgcgatttctgaggcggccgtattgtaagcgtgaagaaaggaatcatcctctgtgaaagcgtccagcggaatgttaaaagaatagccgtagccttgcccgcttcctttttccagtacctgtcccgtcccgggaaataaataacgcccggtctcgtgaaaagaaacagtgcagacatcagacctgtcgtaaaacgtaaattgaacgccgtcgccgtgatgggcgtctgtatcaatgtataacacttttgccccgtagttcttctgaatgtattggatggccacggcgctgtcattatagatacaaaagcctgaggccctgccgcggaagccgtggtgaaggccgcctcctaaattgcaggcgtgcctggcttgtcccgtcatgacataatcagccgccgttaaggtgccgcccaccagaagtgacgcggcttcatgcatgccggcaaaaacgggggtgtcttccgttccgagaccgtagctttctccttctgcggcagggagccggcctgcacccgctagttccaccgcctgtatataatcctccgtatgaacgagagccagctcttctttagcggccgtgcgcggtgtgacgatatctccttcgtcaaacgcatccgccgcctgaagcagatcgtatgttaaaagcacacgacgctgattgaacggatgttcctgatgaaattgatacgtctgataagaaggcgagtaaacaaaaacgctgtctctcatggctgatccctcaaatgtttcggccataagacattgtatccggcttcttgaacggcacggataaaagggagcggattcatcgtcttcacccggaagacgagaatgttcgacccggcggaatcatggggatagacgagcacactcaggatttgcagctgaagatcgcggcacatgcagctgagatcagcaaggctttttgtcatatccgtcaccaggatttccacctgtgatcccggctgggccgcgcctgtcaggctgacgaaagtccggagcacgtcggttttcgttaaaatgcccgtcagcttatggtttaccgtaatcggcagacagccgatgccgtgctcataaaaggaagcggatatttcttccacaaagtcaagcggatgggcgcagatgacattccgcttcataatggtctccactttgtttgtcagaaatgcgccgcgttccttttgttcaaagctgccggggccggcctgtttaatgtctctgtctgtgacaataccgatgacgtgcagctcgtcgtcgatgacagggagatggcggatatgatatgtcttcattttacggacggctgtttcaatggagtcgtgttttgagacggtgatgacgtcccgtttcatgatttgttctgcaatcatctttttatcccctttgtatgtcagtcaatacataaatcgctgataaaaacgaagcctgtcgaactgttcaattgactcctgactgacgtgcctgccgatgcgggccatcagacaattggccggatgagaactgatttccggttcatccgttgcgaaccagacaagacccccggcattcatcatcttttccatgatctttctgtattcccacacatcttttttcattccttttaaatcccaatgccagtaatattccgtcgtcatgatgatgtaccgttccatctgttcatccatcatgctgactgtcagcaaagtttttccgacagaacagcccctgtagccgggagcgacctcgatcgccccgagttcaaggaggtcttccatatttccgtcagaccatcgttcaagcggatcaggatataaatacgtcacatagccgataatcgtctgtccgtccctggcaataatgatccgaccttcaggaagcccggcgatctcgattaacgctttgtgctgttcatgaggaaggcgaaaggctgtcaggccttcatgaaactcatactgtgctaggtcctctggaggaacgggcccttctactaaaagagggccggctgctgtctgaattgatgaagaatggtacgttttatgatgtttcactgattcaccgcctgtcggttcttaataaaaacacatctcttttaagcataacaaaatataaagcgttttcaatagtgttgtaatttatattttaaaaattgagaaaactgtgaacatctactataattagtctatagataagcaaagggggatgttgcatgaatttgaaagcgctgccggcggaaaaggggaattatcatctgcgaaattatgaggaaacgtaccgcagcttcgattggaaagaggtcgaagcggcattttcctggcatcagacggggaagctgaatgcggcgtacgaagcgattgaccgtcatgccgaatcatttcgaaaaaacaaagtagcgctgtattacaaggacgcaaatcgggatgaaaaatacacatttaaagaaatgatggaggaatcgaaccgggcgggaaatgtactgagacggtatggaaacgtggaaaaaggggaccgcgtttttattttcatgccgcgttcgccggagctttactttatcatgctcggcgcaattaaaatcggtgcgatcgccggtcctttatttgaagcgtttatggaaggcgccgtcaaagaccgcctcttgaacagccaggcaaaggttgtcgtgacaacacctgaactggccgaacggattccggcggacagcctgcccgacctcgagcatattttcattgtcggcggcagcaaaggagcgggagataaaatcattcattatgataaagcggctgagggagaaagcacgagacttgatattgaatggatggacagaagagacggctacctgcttcactacacatcaggatctaccggaacgcccaaaggtgtgctccacgttcatgaagccatgattcagcaataccagaccggcaagtgggtgcttgatcttaaagaagacgatatttactggtgcactgcggacccgggctgggtgaccgggacggtgtacgggatatttgcgccgtggctgaacggagcggcgaatgtgatcgtcggcggcaggttcagtccggaaaactggtacggcacgatcgagaagctcggtgtcagcgtctggtacagcgctccgacggctttcagaatgcttatgggcgccggagatgaaatggcatccaaatttgaccttacttcacttcgtcacgtcctgagtgtcggagaacctttgaaccccgaggtcatcaagtggggacataaagtattcggcaagcgcatccacgacacgtggtggatgacagaaacgggcggacagctcatttgcaattatccttgcatggagatcaagccgggttcaatggggaaaccgattccgggagtggaagcggcgatcgttgacaatcagggaaatgagcttccgccgtaccgaatggggaatctcgccattaaaaagggctggccgtcgatgatggattccatttggaacaacaaagagaaatatgattcttatttcatgccgggcggctggtatgtttccggagattctgcttatatggatgaagacggttatttctggttccaaggcagagtcgatgatgtcatcatgacatccggcgagcgcgtcggcccgtttgaagtcgaaagcaaacttgttgaacatccggcgattgccgaagcaggcgtcatcggaaagccggaccctgtccggggagaaattattaaagcgtttatcgcgctcagagaagggcatgagccatccgatcagctgaaggaggacattcgcctctttgtaaaacaggggcttgccgcgcatgccgcaccgcgggaaattgaattcaaagataaacttccgaaaacacggagcggaaaaatcatgagacgtgtgctgaaggcgtgggagctgaacctgccggcaggcgacctgtccacaatggaagattaaagacggcgttgacatcgtatcttatttatgttaaaaatgagtaagcttcatacgaaaaggttttgattgagacaagtagggtatctgattgttcaagagagctgatggccggtgaaaatcagcacataagatatgccgaatacactcatgaaccgtttttgcgaacaaagccattccaaggctttcagtagtgaaagaacggacacggtccgttatcaaaaagagtgataaaagcttttttatgcttttattagtagggtggtaccgcgattatatcgtcccttcgttttaaacgaaggggcgttttttattttcataaacaaaggagcagacaaaatgactaacttattagaggatttatcattccgcggcttaatccagcaaatgacggatgaagaaggactgaataaacagctgaacgaggaaaaaatccgtttatactcagggtttgacccgacggctgacagcctgcacatcggacaccttctgccgatattgacactgcgccggttccagcttgcaggccaccatccgattgcgcttgtaggcggtgcgacgggactgatcggcgatccgagcggcaaaaaagcggaacgtacgttaaatactcaggatatcgttgtcgaatggtcgcaaaaaattaaaaatcagctttcccgatttttagatttcgaggccggagaaaaccccgctgtcatagcgaacaactttgactggatcggaaagctgagcattattgaatttctccgtgacgtcggaaagaacttcggaattaactacatgcttgcgaaagatactgtaagctcaagaattgaaaccggaatttcttacacggaattcagctacatgatcctgcaatcctacgattttctgaatctgtacagagaaaagaactgcaaactccaaatcggaggcagtgaccagtggggcaacatcacggccggtcttgaactgatcagaaaatcagaagaagaaggagcgaaagctttcggtcttaccattccgctcgtcacaaaagctgacggcacgaaattcggcaaaacggaaggcggcgccatttggcttgataaagaaaaaacatcgccgtacgaattctaccagttctggatcaatacagatgaccgcgacgtcgtcaaatacttaaaatactttactttcttatcaaaagaggaaattgaagcttatgctgaaaaaacggagacggctcctgagaaaagagaagcgcagaaacgtctcgctgaagaggtgactgttcttgtacacggccgcgaagcgcttgagcaggccgttcatatctcccaggcgctgttcagcggcaatattaaagagctttccgctcaagacgtcaaggtaggatttaaagatgtaccttcgtttgaaaaagaccgctctgaagaactgtctttagtagacgtgcttgtggaatctaaattgtcgccttcaaaacggcaggcccgcgaagacattcaaaacggagctgtttacattaacggcgagcgccagacggacatcgggcatcttctgactgcggaagaccgcattgaagatcaatttaccgtactgcgccgcggaaagaaaaaatacttcctgatcacgtactgaaaataaaaagcagtccggccgctcaatgcggcaggctgcttttttatgttttgtgaatactgcacggggaaatgagtacagtacatagtataagcaaaacagggaaggggtgctgcgccgtgaatttcatgtttaccatcgcaaaagaaagattgcagcgggatcattgggaacagcagcaaagcataaacgccgaagccaaagccgaggaatcagagacggaagaagaaaatccgacatcataaaggtaaagcctccattctgcggaatggaggcttttgattgtcaccatatcagcctggcggcggccatcagcacgactcccgtgatgaccgtgatggataagctttttgtcagcatcgcgcaaagcaatgtcgggatgagaacgatcattgctttccaatcaaaggtcaaagcactgtttgttttcacaatcatgctttccgttaccagagccgtcaaaatgcaaagcggaataaaggagagccattttaaagccaactcaggcatctgaatgttccggacaaatataaacggaacaatgcgcggcacaagtgtaacaatcatgcagccgagtataatccagatcatttgtgtgctgatgctcatttgtccgtcaccaccccgatcgttgccacaatcacggttgagacgatgaccgcgatgtgtgacgggacgaaatacgataacaagaccataaaaatgatcatatagagaattaaggagaggctgtgcttcagcttttccgaagcggacgattgcaattgcagcacaagcagcgccgcaaacatagcgggcaaagcaaagtccaggccgagcgcgtaaggatcagatatccattgtccgagaagcccgcccattacacaggaaataacccagcacatgtaagcggttatattgaggccgttcatccatttatcgtataacctgccgttctgagccgctttgttcaccgctaccccgaaagattcatcagtaagcaaagccccgaagccgatatttttcagcaaagagtatttcgtgaaatacggcgcgatggtcaggctcagcagaaggtgccgcagattgacgataaacgtcgttaaaataatggcggaaatcgggctcccggaaacaaggagcgagcaaataataaattgggcggcgccggcatagacacacaaagataacaaacaaatttcaagaatgcttagatgagaggcaacgccaacgatgccgaaagcaaaaccgatgctcatatagcccagcagcgtaggcacacaatcccgcaccccctgtaaaaacgtatcgttcatttcccgggaaacggcggttttttgcacttctgtgttaatcatttttcatactcctttcatagagattataatgataacgactaatgaaaaaatcaaagaaaatacggttcacatttatatgaaccgatttccggtgacgacatgaaataacgaatggttttgtttcatcaggccttcaactttctcagccccgacttctttcacaagctccgcgaacatcagatcgtgcctcatatattccatggccacgagaacgagagcgggatcttcggatttaatggcccaggcattcgtctgcggagaaaaattggcgattaagacttctttattatcgcgggcagctatcgttaatcttccgcccatccgtttctccgccacttcaggagacatattatgatttgtcgtatttccgagcttcacttccggagggccgaacacaatcgaaaagacgggcaattgttcggcggcgcgtttgttagcggcttcttgaataaagggaatctgctgttcccagacagacagccacaactcttcctcggctttttcaatcatatccttcatctcattgatgacatgatcattcgtgctgatgcggcggatgacattcatttcctgctcgctttccagcgccaataacttttcctcaaggtagccgaatgagttctcgaaatcatgccggagccggtcgattaattcctttccggcaagcggagcatatgtaaccggatcagacggcacaatatggacagcgcctttatcaactaatttccccaatacctcatagatcattgagcgggggacgcctgaccttttgctgatttcatatccggtaacaggcgagtgtttcaacaagccgatatatgctttacattcatattgagaaaatccaaatttctgtaattctttcagaacatcctccataaacatcctccgtagtggttattcatgaaactactataatgtaagcggttatatcttgtcaatgggacttgagtgctgaaagaaaggtgtgcctgtttttgtcgctttccaacttagtttatggtgagttacatgtatggcttttgtgaaaaacgttgccgtagacccacacgaatgccgtttgatacgataaattcaagaagttaaaaagaggaggatcacggtggaaaacacctctaaaatcgcttttttatcggttataagcaattccctggtcgtcatgctcaaaatagtggtggggatcataaccggatctgtcgcgatactttctgaagccattcattcttttttagatttgatcgccgccttcatcgcctttatctccgtcaggatttcaaaaaagccggctgatacagggcatccgtacggtcatggaaaagtcgagaatctgtcggggactatcgagacgattctgatttttgcggcagggatttggatgatatatgaatgcgttcaaaaactggtcaacccggcgccggttcatctgcctgtattgggaattgttgtgatgcttgcgggggctctcattaatttgatcgtttcgaagttcgtaaaaagagaagccgaaaaggttaattccgtggcaatgaaatcaaatgccctgcatttactgactgacgtgtacacatcattaggcgtagcggcaagccttttggtcgttaccgtaacggagtggtacatacttgatcccattataggtatggtgctggcggtgtatatcatatatgaagcgtttaagttaatgaaagaagcattcccgccgctgattgatacccgtttgtcggaagaggaagaaaaaacaattttaaagattattgaaacatttcaacaggaatttattgaaattcacgattttcgtacaagacgctccggcccgcaggagtatattgattttcacctggtcgtagcctctcacgtgacgattaaagacgtgcatgacctgtgtgaccgcattgaaagagatattacgaatgaattcaaacaagcacaggtaatgattcaccccgagccggagagcgagaggaagaaataaatcgatcttaagtttgcgtttgttcccggcaaaatgcctgcaaaaggcccgttcccacgggtctttttgttgtataaatgactatttctcgctcatatgagagataagcttatacacgtgaggggttcatttcatacgttatgttgtaaagaaaaagggaggtgaacagaattgaacgctatttctgttaaagaaattgaacatggagttgccgttgcggaaagagaaggtttaggggagtatttataccaagaaccggtttctaaaaaatgttcgcgccgttcccgcagcagaaaacggacacaccgttctcgcagcagaagacggacgcatcaccggacacaccgttcccgcagcagaagacggacgcatcaccggacacaccgttcccgcagcagaagacggacgcatcgccggacacaccgttcccgcagcagaagacggacgcatcgccggacacaccgttcccgcagcagacggtctcatcaaaaacgtagccgcaaacgctgttttaaatgctgactgcagactctattacaagtaacggagatctgctataatggcaagagaactgcataaaagatccggtatcatcatctgcggacactgaactgacaacatggcgctgtttgttcgtgtccgttttttatgtcaaaaaagatgccggaggataaaaaggaagggatgacgccgaatgaagctgaatgaggatttttataactctgaaggaaagacagtctctttgccaaacatcagcagcaagcttttgcatatcacggacagcgggcatatcagcgttgacttcatcagcataagcaggctgcggaaggcttcaaaaatcgcgatcttaggtgacagcgtcgcccgggggctgcgtgcggaatacggctttggtgacattctgaaagaccggacaaacgctgaaataaccaatctgtctgtcagcggcgttaatatgagcaacaacggaagcgataacatttatcagcaggcgcttaaaacaaagggacatgatgtcatcattgtccagggaacagatgatgattggtgcaaccacattcccatcggcacagatgaaaaggatatcaccacattttacggaggcttctgccaagtgatccagcagctgcggagcggaaataaaggcgcgagcatcattgtggtgaccccaacgagacaagccaaaatgtcaaaaggaaaaatcgtccgccgtgatactgataaaaataaactgggcctgaagctggctgactatgtgaaagcccaaaaagaagcctgcacactcctctctgtaccatatgccgatctgtttgatactgatctcatcgacccgtataatcccgctttccgcagcatgtgcatgtcagaaggtcttcatccgaacgagaaagggcatcaaatcatatttcaggaaatctgccggaattatttttactattatgggtaacacagcgctaacagattattttcggctttgcttttctaatagctcaattattctttgagatgcgtgtttttgcgctctcaaaagcgagacgatattaccggtaaaaccgattaaaataaaaagcagcaaaatgatcatccacatagcgaacctcccgtcgagtgttgaaaaacccactctttattttacttattatggatgggggagagaataggtctaactattggtgtttctttataaatccataaaaaaatgcacagactgaacgggtctgtgcttttttctcttatttcagcaggttcaatgattcacgattaaaggcttccaaatcgtcaggtgttctgcttgttacgatgttatggctcacgacgacttcttcatctttataatgtgcgccggcattgattaagtctttgcggatgctgcggaatcccgtgatatcttttcctttaagaaggtcggtatcaatcagcagctgcgggccgtggcagatcgcgaaaacgggtttctgattttccacgaatgctttagtgaattcacccgggcggtcatctccgcgcagaagatccggtgaaaagcctccgggaatcaataacgcatcgaattccttggcgtctgcgtctgagatcgcttgatcgatctttactttctcaccgtgcttgcccgtcacttctttccctgcttccaaatctattgtcactacactgtggcccgcttctttaaatgcttccgccgggcttgtatattcaatatcctcaaattgatctgtcatcagaactgcgatttttttgctcatacatcatgcctcctgtgaatttgtatatgacaagaatatcaggcggattcccgcctcacaacgtatttgcttatgaaaaaagacccctctggaaaagaggagccaaaaggtacggaggtctgctgaaacttacgtgtttaacctgagataaggcaagaaatcgaaccaattactttttgcgtctttttttctgctttttacacccgcatttccccggatcgcccggatcaatgacttcgtgaattgtttcttccttataaacgtggcggggaacataacggatatgctctctgttaatgtgtttgatgggatggacgtaaaccacttctttgtcagtatacttgtcagtcacaatatacttagggtcacagtaatacactttcgattttttacccattcatctcacctcccgtactttattaaatgctgacaaggagggttttgcatcggacaagtacaccatggcaagtccacaattttccagccgcaatttcgtttttctgatttttcctgaatccgcctcaaattggaacggctaaccctttttgagcggggaaatctataaaaaagaattcaaaaacgattattttctcaggtcaatcgagatgcatacatctttagggggatttttagaatgctcgatgaaaaaacgattgaaatcattaaaagcacagtgccggtcttagaagagcatggtgaagaaatcacaggccgattttatgacctgctgtttcagcatcaccctgagctgctgaatatctttaatcagacgaatcaaaagaaaaaaacacagcgtacggccttgtcgaatgctgtgattgcagccgcagccaatattgaccggctggaaaacatcgttcccgtcgtcaaacaaatcagccataaacaccggagtatcggtgttaaacccgagcattacccaatcgttggaaagtacttgttaatcgcgataaaggatgtgctaaaagacggggctgctcctgaggtcattcaggcatgggaaaaagcatacggcgtcattgcagacgcttttatcggaattgagaagcacatgtatgaacaagcggaaacgcaaaaaggcggctggaaagactatatggcgtttaaaattgataaaaaggtaaaagaaagcaaggagataacgtcgttttatttaaaaccggaagacggacaagttctccccgagttcaaagcgggacagtatatcagtgtaaaagtatacattccggacacgggttatacgcatatccgccagtacagtttgtcggatgtatccggtaaggattattacaggatttccgtgaaaaaagacggaattgtttcttcatatctgcatgaccaattacacgaaaaggattcaattgagatcagcgctccggccggggatttcgtattagaccctgattccaaaaagaatctggttctcatcagtgccggtatcggaattacccctatgatcagtatgttaaagacggttgccaaaacccagccgcagcgaaacgttctctttatccatgcggcaaggagcggagagtatcatgcgttgcggcatgaagctgaagaagccgcggaacactcatccgttgacaccctctttatttacagcgagccgtccgaacaagaccgttcagaaaacattcgttttcgggaaggccggattgacaaacagctgttagaagaagtgatgacagataaagatgctgatttttacctgtgcggatcaccgtcgttcattaaagaaatgaaaaagctgatttctgaattcaatacaccgccggaatccattcactatgaattatttgaaccgcagctgagtatggtgtgacgcagcaaaatcataacaagaaaagacagtctgtttaacagactgtctttatatgtttaaacgtccttctcattccagtctatagtattttcaagcaggtaaatcatattcaacgtcgtagtatcataaaaagacaaagctttttatgtcccaacatacttcggtagccggctggaatggttcacttcctgatacttcaactggagcattggctcctgctcttgcgaataaaatagcatcgctctaatagtaagaggtggctcaatggcagtttttgttgaaaaaacgctccaaggtctaaaagaattaattgatgaaaaaggccgcttaaaaattttagggagtgaaggaacgcttttagaaacagaatgtactttctttaaaggtgcaacagatctggagattgagagttttgagaagaaaataaaagtctcacttcctgaagattataaaacctttttaaaattgcataacggagccagaatatttgatttgttgatttacggtgagaatgtgggtgggggtttgcatattcttaatgtagaagagattgaagagtatatgcaaaatggttttttagagcctcagtttattcctgtcgcacatctgttagacggatgttatttgttaattgacaaaaccaaaatgtccacagatccaaactatttatggttccgcggatttattgagtatgaaccaatgcaacttaattttgagatatttttagataggtatatcatgtctcaaggagcaaatttttgggagtggaatatctatactgctgaaaattattataggactcaccagggtgatgaggattaacctttcctacagttgggttggttcatttttgcggttagacttcgatttgaacttttaaaaataggtttaatttgggagacgaaccgattaattggtgtatagaggatttataaaaagcgcagatactctgcgcttttttatttaagtatttttcgaatcattcgcagcccgtttttggaagaaggataacggaaagcgaagtcgaagcggttcgtttgtttgacgacgctttttttgtgcgtaaacgtgttaaagctgtcaaatccgtgatagctcccgatgccgctttccccgacgccgccgaatggcaaatacggcgtcgcaacgtgcattaacgtatcattgatgcagcctccgccaaacgacagattctctaaaacagcgcgctcagtttctttgtttgttgtgaagagatacagagcgagcggctttgggcgcgattggactttctcaatgacttccccgatatcacggtatgtaaagagcggaagaattggcccgaaaatctcctcctgcatcactggagagtcatccctcacttgttcgagaatggtcggcgcaattttatgatgagcgggatcagattgtccgcctgtgagcgggacgccatcattcagaaagctgagcagccgctgatagtggcgttcactgacgattttgccgtactgcggattttgttcaggctgagggccgtaaaattcactgatcgcacgcttcatttcttctgtgagcttcgttttgatatcttggtggacaaataaataatccggtgcgatgcaggtttgccctgcatttgtaaatttcccgaagacgatgcgtttggcggcaagctgtatatcagcatccttatggacaatgcagggacttttgccgccgagctccaaggtaacgggaattaattgtttggcggcggcctccatgacgatttttcccacggcaacgcttcctgtgaagaaaatatagtcaaagggctgctgtaataacacagtgctgacgtcgggcccaccctccgccatagcgacatagtcactcggaaaaacgctgctgatgagtttggaaagaacagcggaaaccgccggcgtatattctgacggtttgagaacgaccgtgtttccggccgcaatggctccaatcaacggagaaagcgccagctgcaagggatagttccaaggcgcaatcaccaaaacggttccatatggctcagggataatgatgcttttcgagcctaggtgagtcagaggcgttttgactcgtttcggtttgatccattttcccagccgcttcatcacaaaactgatttcctccagtacaattccgatttctgtcgtgtacgactcctgttcggatttgtggagatcctgatagagagcggctgttatatcggcttcttgtgttttgacggcttgtttcagcttttgcagcatgttcagtctcgattctagctgtctcgtatgccccgccgcaaaataggctttgtgcttgctgacgatagaggggatgctgttcattcagtcgctccttttttgtaaggtatgatgattcattatgtaaaaaatcgcttctgcttgtcaaatgggtttttctaatgtacatgtagctgaaaagccagttggtacataaaaaaagccccggacaggggctttttttaataaagagagggagcttctgtccattattctgacagcccaaaagaaaaaccccggacacattgtcatcacaacatgtccggggtttaatccaatgctctttaaagagcgtttacttaacgggagtagaactcaacgataagcgcttcgttaatttccggagcaagctcagagcgctctggaagacgagtgaatgtaccttcaagcttttcagcgtcgaaagtaaggtactcaggaacgaagttgtttacttctacagattctttgatgatagaaaggtttcttgatttttcgcgaacaccgattgtttgaccaggttttacttggtaagacggaatgtcaacgcggcttccgtcaacaaggatgtgaccgtggttaactaattggcgtgcttgacggcgagtgcgcgcaagaccgagcttgtacacaacgttatcaagacgtgcatctaaaagaatcatgaagttttcgccgtgtttaccagtcatttttgcagctttgtcaaacaatgtgcggaattgacgttcgtttacaccgtacatgtgacgaagtttttgcttttcttgcaattgcaaaccgtattctgatagttttttacgctgtcccggaccgtgggggcctggtgcgtaagggcgtttttctaattctttacctgtaccgctaagagagattcctaaacggcgagacagtttccaagatggacctgtatagcgagccataatgtgactcctcctttggttttattttgtggaaaataaaaaccgtctgttcgatccgaccgtgcacattttgttttcatgtatcctcgctccagcagcagagagttacacgatacaccttacagctaaggaacaaaatgcaaacacagaagctgaacaaaaaggctgcaatatttcacacaaagaacattatatgatttttctccgccgccgtcaaccatttctccatgaagagtgccggtttatgatataatgtacaaaaatgagtagtacatgtttaggtgataaaaatgaaaaaacaaacaattgatgaagtgacggcctttcatcagaaaatgctttcttttttcttaacgaaatctgaatccgtctcattatccgactcgctgttatggctggcctcagctctagaatcctgctttacatctctttcattgaccctttcaccggcagaatcaacacgtttcaccataaaaacagaagatgaaccgcattatgctccgctgaaagagagtgacggccgttttatgatcaggaatcagacgtccggcagatccttttatctgcgctcggaaggcgggctgccgatcccggaatcattgcctgagatcgttactcagtttattaatcaatctgtgagacaaagcgggctgtttgacaaaacgaagcatcagcggaaaattcacagaatgacagaaatgttccattcgcttttggaccaaaatgaggttttggaaaaactgcaggcaagtttgagtacggctttccggtctttccgtttttcactgtttatcacgcaggatcaggatacggacagacagcttcccgcaaaagaattacatatggacggaaaagatgccgatccgtctgccctgaaggtttatttatcggggagactgctcagaaaaggcaggtcatctgcttatctgccgatcaaaggccagcaggggacttacggggttctgaagacggaggggctgcaggatgccgttctttcgtgcagtactctcagtgaaatgctgctgcttgcgggcgcagcgggaaaagcatttgaaaatgcgcagctctatgagcaatcgaaaaaaagcattgcgaatctggagctcattaatgaaacatcgcgccagctgaatcagcgcctcagactcactgatacgatgcgggagctcgccgccattatgacccaatcgtttcatgcggaagaagtggctttttttcatattgatcattttgagacgcaaaatctgcttccgggacataccgctttttttaagacagaacgtgcgaacccctatatcagcattgtgaaagaaaagctgttcgagggagaaaagggcgtgtttatcggcagcggaaagactgtattcggcgaaaacggtttcggctcgctgatggcggtgccgatgatcgaaaatgacaccgtcttcgggtttgcgattttattgaaaaaggatttgtatgcttttacgtttgaaatgtataagctttttcaagcgctcattcaccatgcgacattggcggtcacgaactccatgctgcgcgacaggcttgagcaccttgttcagacagaccagctgacggagctgtattcaagaacctatctggatgagaaaattcaatacagcatgaaaattcataaacggggtgtattcatcctcgttgatatcgataattttaaaagtattaatgatacatacggtcatcaaacgggagattcgatcctgattcaggtggcctccgttatgaagaaccatattcgtgagcatgatgtcgctgcgaggtgggggggcgaggagctggctgtctatctgccgaatatcaacgtgtcatccggagaacgcatcgctaaaaggctggttcgcgccatccgggaaaataccgagccgcgcgtgacgatttcctgcggcgtttcctgctggtcaaagaccggcccgatgccgttgaaattgctcgttcagcaagcggatgaggcgctttatatcgccaaacggaacggcaaaaaccggctgatcatccatcaaaacagcacgacgacataaaaaaggagccggcctgccggccgggctcctttttttatcctaatcgtttttcaagcgtttcaacaaactttgctaaataggtttcgtccgtttcatcaaaacggtttttcacggggctgtcaatgtccagcacaccgatcacttcaccgtttacgcggatcgggaggacgatttctgactgggaagccgcgtcacaggcgatatgtcccgggaacgcattcacatcggcaatccgctgcacgtcgccattagagtaggcagtgccgcatacgcctctgccgaacggaatgcgcacacaggcaggaagtccttgaaacggtccgagcacgagctcgccctctttagcgaagtaaaaccccgcccagttgacttcatgtaatgaatggtataaaagcgctgacgcattcgcgtaatttgcgatcgcatccgtttcatcttctgtcatggcttcgagctgtttaagcagaagctgataacttttttctttatctccggattgtttttcgacatgaaacatggaaaaccctcactttttctataatatcaaacaaagttccggccgttctgccggcatttgtcgagaagttcttacaggaacggcgcctttctgcttgaattgttacacataaaggggtgagccgtatgaaagtaaccaccaaagacaaaattattaacgccgctgtccagctgtttaaccaaaaaggttattccggcacgtccgtccgtgaaatcgcaaagtcagctgatgtaaatgttgcgcacatctcctactattttaaagggaaaggcggattaatggaacatttagtttccgagttttacgaaggctatactgaagcgctggaaaaagccgccgtcagtatgaacggtgaagacgcgcaggaacgcatcctgcgggtgattttcgatattttatcctatcagcacgataaccgtcaattaacgcggtttgtgtaccgggaagtgacgattgattccgtgcttatcagggaaattatgtctacttacttaatgaaagaaaaatatattttccagctggtgattgaagaagggcagtcacgccacaggcggctgacgctgcccgtgccgcattttattctgcaattgaaatccctcttgatgatgccgtatcttcagcctcaatatattacggaggtgctctatatgcagcctcatgaaccgtacttttataaaaggtattttgaagaggtgaagatctggatcgaaagcgtgttccgacggcctgatgcggcgcttatgaagtaatgatgcttttgtacgtttcgtaggaactgccgacatcttccgcttgatgggcgtccgacccgaatatgagtgggatttttttttgcttcgccgtctcagccatccaatcctccatgtatacttccccggcaaacttctttctgagcccggatgtattcacatccagctccattccgtgttctttcacggcgtcaagacagcgggccgcaagctctcttatttgaggtgacatgctgtaagggaaaaggcgcgcgaattttttgacgagcgtgatatggccgacccgttttggcttaaaggggccgagcggtgttacaatggaagaatacacggtttcatagtattgttcatatacggcttcaacgcttccgaagcggtcggcaagctgctgaaacgcgtgctcgtcaaaatcgaggcatatataagacgggccggtcttcaaaaaatgaacggataaaatgccgtcatccagtgaggggccgtacgtgttcagaaacgccgcggtttcctcttcataccctgagataaaatcggtttctagcccagtcagaatgctgatttgtccatcgtattcctttttcagctgtgacagccgctccaaataaacctccatctgtctgagatccatcgcgctgtcctgaagcggtacgggatcttgaaatgacggaggaaggggggcgtgctctgtaaatgtgatcgagtcaaagcctctttccagggccttttcgacatattgtttcagcgcatccttcgagccgtgagggcaaaaaggcgtgtggatatgagcgtctcgtttttccatttgtgtcactccattaaaaaattgcagaatcctgccgaaattatgcaaaaagtttttgatttctggtcaaaaaatgttggttacatggtatcataataacaatgaaaacgacagattttctcaatacatatattgaaatctttctgaatacataaaacaccctgacagattaagagaacaacaagggggctcattatggagttagtcatcggattattggttatactgctcgcgctctttgcggcgggctactttttcaggaaaaaaatttatacggaaattgaccggctggagtcatggaagattgaaattttaaatcgttcgatagtggaagaaatgtccaagatcaaacatctgaaaatgaccggagagacggaagagttctttgaaagatggcgcgaagagtgggatgaaattgtcacagcccatctgccgaaagtagaagagctcctttatgatgccgaagagaacgccgacaaataccggtttaaaaaagcgaatcaggtgcttgtccacatcgacgacctcctcactgcagccgaatcaaatatagaaggcatactgcgtgagatcagcgaccttgtgacgagcgaggaaaaaagccgcggagagattgaacaggtgcgtgagcggtattcaaaagcgcggaaaaatcttctggcgtacagccatctctacggagagctatataacagcctggagacggatctcgacgaaatctggagcggcataaaagagttcgaagaagagacggaaagcggcaattacatcaaagcgagaaaagtgctgcttgaacaggaccgcagactggatcagcttcagacatacatagatgacgttccgaaactgcttgcggactgtaaacagaccgtgcctaaccaaattgccaagctgaaagacggctaccgggaaatgacggaaaaaggctacaaattggagcatattcaaatcgaaaaagagctggagaccctcaccaatcaagtgaaacgggccgaaagcgcgcttttggaagaattagatgtcgacgaagcgtccgccattcttcagctgattgatgaaaccattcaatcgatgtatgaacagctggaaggcgaagtggaagccggacagtccgtattaagcaaaatgcctgagctgatcatcgcgtatgagaagctcgaggaagaaaaagaccgcacaaaaaccgaaacggagctcgtcaaggaaagctatcagctgacggcgggagaaatcggcagacagcatgccttcgaaaaacagctggaaacgatcggccgactccttgagcaggcgagagaaaagcttgacggcgagcatgtcgcttactcgctgctgattgaagaagtcgaggccatcgaaaagcagatggaagaggctcagaaagaacatgccgaataccgtgaaaatctgcaggcgctcagaaaagaagaactgcaggcgcgggaaacgctgatgcatcttcggaaaaccatttctgacacggcccgaatgctgcaaaaaagcaacgtgccgggaattccagaacaagtcaaggacaagctcgagacggcaaatcatcatatagaagaaaccgtcagccaattggaagagctgccgctgaacatggaggaagccgccaaacatctagccgaagccgaaaaggtggttgaggaagtcagcgaagaggcggaagatcttgtgattcaggtgaagctgattgagcggatcatccagtacggcaaccgcttccgaagccagaatcatattttatccgaacagctgaaagaagcggaacggctgttttacgcttacagctataatgaagcttatgagatggcggcagatgctgttgaaaaagcagctcccggcgccgtaaaaaaaattaaagctgatcaatctgcttcatagacgcataagcaaaaactgcaccctgatggaaatcagaggtgcagttttttagtttctcacggaatataaaaagcgcctgcggctgatatacatcaaaccgcaggcgctgaatgttacgattttgctttatttaattcgatgggcgggctggtaaaaaacgtgataatgcagccgatgatcgctccggcaatgcccggaagcacccagccgattcccatgctgtaaagcggaagatttgcgtttaagaatgaatctaatgatccgagcggaatgccggctgccttcaaaccgtccaggatactgaacagccccgttccgatcaggcaggcgatatagacttcgcgtctttccttaaagattttatcaataaaggaaaggacgataatgacaatcgccagcgggtaaatcgctgataaaataggaactgaaaatgcaataatctcagcaagtccgaaatttgaaatcgccagactgaacagcgtgacaatcgtaaccaccattttgtatgataaagcgggaatcaattttgaaaaatattcgccgcaagatgtgacaagtccgatgcttgtcgttaaacacgcaacggtgatggcggcgccgagaacgatgtttcccagtgaaccgaacaggtaatcagatgaagctgataaaatctttgcgccttcgccgagcggccccacagcgtccgtgcttgtcgctcccaaataggccaaagataaataaatgaatgtcaaacctgccgctgcaatcagacccgctttaatacaagcggcggcgagcgctttacgctgggtgacgcccctgcttttaacagcgttgacgacaacgacgccgaagacgattgaggcgagcgcatccattgttttatagccttccaaaaatcctttgaacaccggcgttccggaatatgcctgatgtacggcgcccagcccgcccatcggagtgacaatggcttttacgacgatgattaaaataataccgaatttaataggagtcaaaatctttccgactctgtccacgattttggacgggttaagagctaaataatacgtaatagaaaaaaagatcaacgtgaaaacaaataaagataatctttccggaatgccgcttaaaaacggaactgcaccgatttcatatgaaacggttccggttctcggaatcgcgaaaagcggcccgattgataaataaagcacaacggtgaaaatagtcccgaataccggatgagctttatcggcaagccctttcgcgtctttgcccgttaatgcgatagcgataatacccaaaagcggcagacctacgccggtcagtaagaaaccgcccatcgctttccagacattatgccccgccgcttgcccgagctccggcggatatatcatatttcctgccccgaaaaaaagtgcgaaaagcatgaaaccgataataacggtatctttgacaggtagtgagtgtttcataaaaatcctcctaaatactatgttgaaatattctgtcaattaattgtcagataatataacaaaacgaacattacttattatatggcaatgtacagataagtcaatactcgatttattgcgaatttatatttacttttgttatggtagcataaatatcatacgatgtaccgttttcattaaaggagtaaaaaaaatgatatatttagacaacagctcaacgaccgagccgtatgaagaggttttggaagtgtataaacagacgagcagccgttatttcggcaacccttcgtctctgcaccagttaggaactgagacggaacagctccttgaagcggccgctcagcaaataaaaaaaaccttacgtttaaaaaattatgatattgtatttacatcaggcgcgactgaagcgaataacgcggcgttaaagggagcggcctgggcaaacatgagtaaaggaagacatatcattgcttcggcgattgagcatccttctgtgacggagacgcttgatcagctgacggagttgttcggctttgaagtcacatatcttccggccgatcaaaacggcttcgtttctttgaaagacgtcaaatcggctatcaggccggatacgataatcgtcagcgtcatgcatgtcaataacgaagtcggctccattcagcctgtaaaggaaatcggcgggtttttgaagcagcaccggaatattctgtttcatgttgatcatgtgcagggcattcataaagttcctctgtctatagaagaagcgggcattgacctttgcaccgtttcagggcataagtttcacggcttaaaagggaccggagcgcttatcgtcaaaaaaggaacgcggctcattccgcttataacgggcggctcgcagcaaaaaggcgtccgcgccggaacggaacacacggcaggcgccgtttcccttgcgaaagcgatcaatctttctgcgcgtgacatgaacgagcggctttcttccgtggaggctgccaagaatgcgctcatggaaaggctgagcgggacggacggggtcgtcatcaacacccccgccgaaaacagcgcgccgcatatcattaatttttccgttccgggcgtgaaggcggaagtgctgctgcacatgcttgaggaaaaaggaatatatgtctccacaaccgcggcatgttcggcaagagagcacaaaccgagccgtgttcttctgcaaatgaataaaggcgaacagattgcatcaagcagcataagagtcagcctgaacttcagccatacggctgacatcacggagccgtttatggccgcgttggtgccggctgttcaaaaactaaaaaaaatgatgaggtagcatatgaattacgatcatattttaatccgttttggtgaaatatccacaaaaggaaaaaacagacgcagttttattgaaagattaaaacagaatatccgcctggtattaaaggattataaaaaagtaaaatacttttcaaaccgggaccggatgtcaattacacttaatggagaaaacccggaggaaatttgttccttattaaagaatatattcggcattcaaagctttagtctcgcaattaaatgcgaaagcaagctggaagacattaaaaaaacggctttagccgcgatagaaggcgaatataaaccggggaatacgtttaaggtcgaaaccaaacgggcttacaaacagtttgaattagatacgaatgcgatgaacgctgaaatgggcggccatattttgaaaaacacggatggattaaccgtcgatgtgaaacatcccgatattccgcttcggattgaaatcagggaggaagcgacattcctgaccattcgtaacgaaaaaggcgccggaggccttcctgtcggttccgcgggtaaagcgatgctgatgctttccggcggttttgacagtccggtcgccggtttttacgcgatgaaacggggattatcagttgaagcggtacatttcttcagtccgccgtatacgagtgaacgggcaaagcagaaagtcatggatctcgcgggatgccttgcgaagttcggcggcagtatgacacttcatatcgtgccgtttacaaagacgcaggaactcatccaaaaacaaatcccggagaactatacgatgacggcgacgcggcgtcttatgctgcaaatcgcggacagaatcagagaagaacggaaagcgctcgcgatcattacgggagaaagcctcgggcaggtagcgagccagacgcttgaaagcatgtatgcgatcaatgcggtgacggcaacaccggttttgcgccctttaatcggaatggacaaaacagaaatcattgagaaatcaaaagaaatcggcacttatgaaacaagcattcagccgtttgaggactgctgcaccatctttacgccgccaagtccgaagacacgtccgaaaaaagaaaaaatcgagcacttcgaaagcttcgttgattttgaaccgctgattgcagaggccgctgccggcatcgaaaccatcactgtttactcggagcaggaagctcacgataagtttgccggcctgttttaaaactgtatacaattaccaaagtttttttgaatgaagacatgtgttttatcacattctatactcacaaggaggtgatacacatgtcacaacaatcaaacagcggaaacagcaaccagcttttagtgccaggcgctgctcaagctatcgaccaaatgaagtatgaaatcgcttctgaattcggtgtaaaccttggaccggaaacaacttctcgcgccaacggttctgtcggtggagaaatcacaaaacgtcttgtctcttttgctcagcaaagcatgggcggaagcagccagcagcagttttaatcacaacttcacataatggctaagagagcggggaattccccgctcttttttcatgggaatagatagaaggcgggaagcaatttatgcatatttttattgtaatggcctatgtttatgtataatggggaaagaaagtgaggagttgttcgtgttaaaacgagaagatttaatcgccccaaagaactataaccttgtaaatgaaatcgaaaagttcagccgttccaaagagaagaacgcgcttatttgggaagatcaaacaggcggcaagaaagtctggacgtatgaaaaattgatggaagaaacgaataaaatcggagcccgcctgaaaggtctcggatttgacaaaggcgataagctgattgtcatggttccgagagtgcttgaagcgtatgccgtttatttagcgatcttaaaagcggggatggtcgtcattccttgctcggaaatgctgcgcgccaaagaccttgaataccggatcaaacacgccgaagtgaaaggcgctatcgtttatccttcatttataaacgcgtttgacgaggtaaatactgatcagctggtgacattgtcaatcggtgaaaatgatgccggctggaaaaacctcctaacgattgaagcggacggagacagttttcaaacagctgatacaacaagagaagacatggcgtttttgtcctatacttcaggcacgaccggccagcctaaaggcgttgtacatacacacggctgggcctttgcccatttaaaaacatcagccggtgcatggctggatatttctgaagacgatacagtgtgggccaccgcggcgcccggctggcagaaatgggtgtggagcccgctgctcgccgttctgggaagcggcgcgacaggattcatttatcacggcagattcagcgccaagacgtatttagagctgctggagcgccatcaagtaaatgtcttctgctgtaccccgacggaataccgcctgatggcaaaagtggaggagttggacaaatatgatctttctgcccttcacagcgcagtttctgcgggtgagccattaaaccgggaagtcattgacgtattccgaaagcatttcggcattaaagtgagagacggatacggccaaacggagagcaccctgttagtcggcgtcctgaaggatatggatattaagccgggaagcatgggcaaaccgacccctggaaatcaagtggagattataaacgataaaggcgaaatatgcgaaactggcgaaacgggcgatatcgccgtgcatttgagcacaccggccttattcaaggaatattataaagatcccgaaagaacgaaaaagcagattcgcggagattactttcttacaggagaccgcgcgaaaaaagacgaggacggctacttttggtttgagagccgcaatgatgacatcatcgtcagctccggatatacaatcgggccttttgaagtagaagacgcgcttgtgaagcatccggaagtgaaagaatgtgccgtcgtggcgagcccggatgaaatcagaggttcaatcgtaaaagcctatgtcgttttacaagacgatgaaaagcgcagtgacgaacttgtcaaagaactgcaaaaccacgtaaaaacgattacggcgccttacaaatatccgagagaaattgagtttgtcgaaagcctgccgaaaacggcgtccgcaaaaatcagacgtgtggagctgagacagcgtgaagaacggctgaaggctgataaaaaagcataatacaggataaagggtgagcggggatgaaagcgatttggcacggcggcaccatctatacaatgctggacaagaatcatgtcactgaagcgatttataccgaagaaggcgtcatcaggcagacgggcagcttccgggagctccaaggaacatacggttcgccttgtacggaggaaatcgatttacatggggctgtcatgttcccggggtttacggacagtcatatgcatttaatcggacacggggaaaaacagcttcgcctcgatttgtcgcagctgacgtcaaaagaagcgatactgcgggccgcaaaagaagcagagcgtgaattggaagatggcgaatggctgatcggcgaaggctgggatgaaaatctgtttgaacagccggattacatcacgaagcatgaccttgacccgctctttcccgaccgccccgtcctgctgaagcgggtatgcaggcacgccgccgcggttaattcagccgcattgcgcgcggcgggaattacaaacgaaacacctgatccaaacggcggaattatcgtccgggacggcaccggtccgacaggccttctgctggataaagcccaagagcttgtgacacaggccctgccgcccgtctcacttccctatgtcaaacgcgcgcttcaaacggcgattacggactgctggtcaaaaggcctgaccggcgggcattcagaagatctggcatactacggagacgcgtccgttcccgttgccgcgtacgagtcattaaccggcagcggcctttatccttttcgcgcccatctgctcgttcatcacgaagccgtcgacagctggagcgctctggataaatcgaccggaccttatctggaatacggagcgatgaaaatttttgctgacggcgcgctcggcggcagaaccgctctattgaaaaagccttatcatgatgatccgtctgtttccggcgttcaggtgcatgatgacgaaacccttgccgctcttgtttataaagcgagagagaaagggatggagatcgccgtgcacgcgattggcgaccttgcatttgaaaaggtgctggatgttatcgaaagatacccggcaaagcccggacagctagacaggctcattcatgcgcaagtattagatgacggattgattgaaagagccgcccggctgccgatcggacttgatcttcagccgcattttgtggccagtgattttccgtgggtgattgaccggctcggagaagagcggatgaaaacggctttcgcctggaaaacactgctgtcaaaagagctgctgtgcgccggaggttcagatgccccgattgaaccggccgatccgcttctgggcattcaatcggctgtgctccgtacgagcaagcagcacccggaaggtccggcctattatgaaaaagagtgcctgactgtgtacgaagccattcagctttacacggagggaagcgcggccatcatccataaagaacatagccgcggacggatcgcccccggctatgatgccgactttaccgtactcagcggtgatccgttcaggacggacccgaaaaagcttcatgaattggaagctgtcaaaaccgtcgtcggcggccgtatcgtatatgaaaaagaggacaggcagtgatgcccgtcctctttttttatgataaaaatgatcgttttactttttcccagaaagagttgtctttcagtttcaccgttttgatttttttatcggatagtctaatctcaacctttttgacattccgcgtgctgagcgcttcattatcaagcccgataatcggatgctcattgccgtcttgcaccacctgcagtgtcagcttccggtctgagcttaaaataaacgaagatccgagtgtacggtatgtgttgttgttcaacgatgccagttcggatacctgcatgcaggaaatcaaaggatcaacaacggcgcctgaaacagatttattgtaggcggtgctgcccgtcggggtggaaatgatcatcccgtctcctctgaacgtctcaaaatgaagatcatcaattaacacatccatcacaaacgttttaataatgcttgaacggatggaaacctcgtttaaacagtgaaaatgattgctgccgtccaccgttacgtgaatgagcgggtattttctgacctcaagctgttccgcggtcatgctggccgccattttttcaggctcatcgctgtgaaaatcacagtacaaatgggctttcccttttttagcgatgccgacatacaggcagtcatcacggaatccggtttttctgacggcttgcagaaatgagccgtcgctgccgatgctggcgataattccggcatcctccggttgagccgcaactgtaaaaccgtgcgattcagcaagctgcttcaaagagctgacttgttcttttgtttcgttgttttgtttgtgaaaaaaataaacattgcggcgaagatcggtcatatccccattcccctttgctgtcatatttacgtttttctcccagcaggtattgtgttaaaatacctgtggcaatagtgtaacatgttccctgtttatccgttaagggaaagcgcttcatgaaaaaaatgaatctttttttacggggaaacgtacgaatattgacagaaaaggaggagaacaaatgaatgcaaaaagatggattgcgctcgtcatcgcgctcggcattttcggcgtatcagtcattgcaagtgtgaccgtcggggtgctgaagaatatcggagatacagggtctgactttgcatcactgacagatgacacagaggaagtgacgctggataagggcagtcccggcagtaaaatcgccgtgcttgaagtggacggcacgattgaggataacggcgggtccgctggcctgctcagctcaggcgggtatgatcacagatcatttttaaaacaggttgagcgtgcgaaagaagacaaaagcgtcaaaggaattgtgctgaaaatcaattcccctggcggaggcgtgtacgaaagcgcggaaatacataaaaaactggaagaactaaagaaagaaacgaagaaaccgatttatgtatccatgggctccatggcggcatcgggaggctattatatttcaacggccgccgataaaatctatgcttcaccggaaacgctcacgggttcactgggcgtcatcatggaaagcgtcaattattccaagctcgccgatgaactcggcatcaagtttgaaaccattaaaagcggcgcgcataaagacatcatgtccccgacccgcgacatgacgaaggaagaaagaaagatcatgcagacaatggtcaacgattcttatgaaggatttgtcaatgtcatttcaaaaggccggcacatgtcaaaagcggatgtgaaaaaaattgccgacggccgtgtttacgacggcagacaagcgaaaaaaatcggcctcgttgatgagctcggtttttacgatgatacgatcagcgcgatgaaaaaggaccataaaaatatgaaaaacgcttcagtcatcacatacgaggaaggattcggattaggctcgctcttttccatgagcgcagcgaaaatgtttaaaagcgaaattgattttctgaatatgaaagaactcatttcgcaatccggttcgccgcggatgatgtatctctatgcaaagtaggggggaagaaagaatggacgcgacttacgaaggctttcacggcaaagaagaggaagccgaacaacagagggcgcccgagcaggcatatgcgggcttttggatcaggttttgggcgtttcttcttgattggctggtggtctggggacttaaccatctcatcgtttcaccgattttcacgctgatgaagctcccggcaacaagcggaatgtttacaatctcagcttattccgtcacaaccctgatcgtctacctcgcctattttgtgttcatgacgaaatggtttcatcagacactcggcaagatggtcttcgggttaaaggtcacttctttgacgcccggaaagccgctgacttggagcaccgtcattttcagagaagcggtggggcgttatatcgataaaatctggattctctatatcgtcattgcgtttacgcccaaaaagcagggcattcatgatctgatcgccgacacaacggtaattcacgaagcgctgtaccgcaaataaaagcagtaaacccggaataaacgtccgggtttattttttttggttttggcgataatgctgctaaggaagtgaagcttatgggatatgccgcagcagctgttattctcattctcattttggcctggctgctcatgaggatgaaaatccatctgactttcgaatatcttcacgataaagataacgacaaactgacgtttaaactctcggccttatacgggctgatccgtattaaaaaaacgctgcccgtcattaaagtaaacagcgaagacgcgtcaattgatgtcaaacaggacacaaaatcagaaatgaaaggtcagaaaaaagagaagaaaaaaatcacatatgaagatgtcaaacagagcattcacagaatagaaatgattctgcaccaagtctttcagatgcgccaaatcgccgcttcatttcttgcgggagtccgtgttacgaagttcgaatgggtgacggttatcggaataaaggacgccgccgttacgggaatcgccgccggcggattgtgggccgtaaagggaggcctgacggcgatgctgtatgatcatctgcgtttcatacataaaccggtgtgcgaagtcattccgtcttttcaagtgcctgcatccaagacgcatttgcagtgtatattcttttttcgttttggacatcttataggtgcagctttcaaattgctcaaatacgggcggaacggactttctatcatacgaaagaaacagccggttccggttgcttcaaagaatgattcatcagtttaaggaggagcgcatatggcagaccatcccattcaaggtttaatgaaaaccgctatggaaaatttaaaagaaatgattgacgtgaatacaatcatcggcgatcctgttgaaacgcctgacggcagcgtaatcttaacggtttcaaaggtcggcttcggatttgcggcgggcggaagcgagtttggaggaaagccggctgaaaaaagaaccgatgatgatgaaagaaaagagcagaagctcccgttcggcggcggaagcggcggcggagtatccattacgccgattgcgtttctgattgtcggaacaaacggcgtgcgcatgcttcatttagacgaaaacacccacctgattgataaactgttagactccgcgcctcaaacgattgaacgcatccagcatatgtttaaaaagaatgaaaaaggccggaaccaaaaaagaacggatatcgatttataatagaaaagttaactgccgcccgcagttagctttttttacgatgcggcataacctttgcagtttgcataaaactcgactatgatagagctatacatagataaagggaggaatcagaatggctgaaattacatttaaaggcggagccgtgacgctgatcggacaagaagtgaaaccgggtgaccaagctcctgacttcacggttctgacaaacggattagaagagaagacattagcagatatgaaagggaaagtaacgatcatatccgttattccttccattgacacaggcgtatgtgacgcgcagacacgccgcttcaacgaagaagccgcaaaactcggtgatgtgaacgtttatacaatcagcgccgaccttccgtttgcacaagcgcgctggtgcggagcgaacggaattgataaagttgaaacattatcggatcataaagagatgtcatttggtgaagcattcggtgttcacatcaaagaacttcgtcttttggcacgttccgtatttgtccttgatcaggacggaaaagtcgtttacgcggaatacgtaagcgaagcgacaaaccacccgaattatgaaaagcctatcgaagctgcaaaagcgttaatcaagtaaagagagaaaaagagctccgggtgctgccgcggagctcttttcatggcaaggaggaaacagcatgcaacacgaccatgtcggtcagatttatgaacttttagatgaagccgcccaagtgatagcagaaggccttcagatttcttatattgaggggcttgcggaagcgggagaaatgtattttcttgaaaaggccgaccagcttccgcttcaggaaaagcaaaccggcgagcttaacagcctgcttgcgaaagcagacttcagaaagtgggagcatgaatggatccgcaaggcgttccagctcgccattttaaaagggctgaaagataagtcccatccgaacagacagatgacgcctgatacgatcggcattttcatcagttacctcgtgaataaatttacgggcggccgaaaaggcctgacattgctggaccccgcctgcggcaccggaaatcttctgctgaccgcggcaaaccagctttctgacaaagcggcaaaaagcttcggcattgaaatcgacgatgtccttctgaagatcgcttatgctcaggcgaatctgcaggaaaaagaaatggagctgttctgccaggacagtcttcagccgttatttatcgaaccggccgatgcggtcatctgcgatttgccggtcggctactatccgaatgacgaaggcgctgaagcgtttgagctgaaagcggatgaaggccactcttttgctcaccacttatttattgagcagagcgtcaaacatacaaaaccgggcggatacttattttttatgattccgaaccatctgtttgacagcgcgcaaagcgataaactgaagcggttttttgcggaaaaagtgtatatcaacgcccttcttcagctgccggctactatgtttaaagacgaagcgcaggcaaagagcattttaatcttgcagaaaaaaggcgaagacgcaaagccgccgaaacaagcgcttttggcgaatcttccttcctttgcgaaccagcaggcgatgcgggaaatgacggcaaaattggatcaatggattcaaaaagaaaaataatggcgaagaagcagtgtgagatgcaaaatcccgcactgcttttgctttttaaaatgaatggaaatcaggacgataacacaaattaaggaaagaaaataacatttcgtaagaccgtgccgtccatttggcacaaatgaaatttatcagaaaatatcgacttcatattgtaagcggtaccaatgtggatgttgacttgaaatgctgagttgacaatgtttaaatggaaaagtcagatattttttggactgcaattatggtctgggaaaaaagaacgaacaaacgaagaagaattttgataggagcgtcatttatgtctaaaattattgcaattaacgcaggaagctcatctttaaaatttcagttattcgaaatgccttcagaaaaggtgctaacaaaaggtttagtagaacggatcggtatcgccgacagcgttttcacaatctctgttaacggcgaaaaaaatacagaagtgacagatattccggatcatgcggttgcggtgaagatgctgcttcacaagctgactgaattcggtattataaaggatttaaatgaaattgacggaatcggccaccgtgtggttcacggcggagaaaaattcagcgattctgttttgcttacggatgaaacaatccgtgagattgaagagatttcagaactagcgccgcttcacaacccggctaacatcgtcggcattaaagcctttaaagaagtgcttccgaatgtgcctgcggttgcagtgtttgatacggcgttccaccaaacgatgcctgaacaatcttacctgtacagcctaccgtacgaatactacgagaaatacggcattcgcaaatatggtttccacggcacatctcataaatacgtgacacagcgcgcagctgagcttctcggccgcccgcttgaagatttgcgtctgatttcctgccacctcggtaacggcgcaagtatcgcggcggtagaaggcggaaaatccattgatacgtcaatgggcttcacaccgcttgcgggtgttgcgatgggaacacgttcaggaaacatcgaccctgcattgattccgtacattatggaaaaaacggatcagacggcagatgaagtattaaatacgttaaataaaaagagcggactgcttggcgtatccggtttctccagcgacctacgcgatatcgtggaagcttcaaaagaaggaaacgaaagagcggaaacggctcttgaagtgttcgcaagcagaatccataaatacatcggttcttacgctgcgagaatgagcggcgttgacgcgattattttcactgcgggtatcggtgaaaacagcgttgaagtcagagaacgcgtgcttcgcggcttagaattcatgggtgtatattgggatcctgcgctgaacaacgtgcgcggcgaggaagcgtttatcagctaccctcactctcctgtcaaagtcatgatcattccgactgacgaagaggtcatgatcgcacgcgacgttgtccgccttgcacagtaatgatcgaaaaaagcacatccttttagggtgtgcttttttattgaatgccccagaatcaaacgttacgatatgtttaatacataaacgatgaggtgaagcaatgagtgtgcatgaacataaacaagaagccccgtcagccgtgcgctgcaaggtgatcacagtcagcgacacgagaacgaaagaaaccgacaaaagcgggcgcgtcatgatggacttcctcagggaagcgggatttgaaacggtcgcttatgacattgttaaagatgaaaaagatgaattgcagaaagccgttttatccggctgtatggatgaatatacagatgcggtgctgttaaacggagggacgggcattgccgaaagggatgtcacaattgaagcggtcacgccgctgttttcaaaagagctcccgggattcggcgagctgttccgcatgctgagctatacggaggacatcggttccgccgccattttgtccagagcggcagcgggtgtgatccaaaataccgcagtcttctgcacgcccggctcttcaggcgccgtaaagcttgcaatgagtaaactgattattcctgaactgccccatgtgctccgggaaatccgaaaagatttataaatgtataaaaagactctgctccgctcaaaaaattgggtggggttttttttataaaaggcttgaaaaaacagaatttacttgttacagtgtatacatacaaaatgcatttttattaattaaaactaatttttatacaaaagggagcttttaacatggcagaacaaaaaaaggttgtattggcatactcaggaggtcttgatacttctgtagcgataaaatggctgcaagaacagggatacgatgttgttgcctgttgcttagacgtaggggaaggaaaggatttggcattcgttcagcaaaaagcgctggaagtaggcgccgtaaattcctatgtgattgatgcgaaagaagaattcgcccgggagtacgcgctcatttctatgcaggcccatacaatgtatgaaggcaagtatccgctcgtatctgcactatcccgtccgttgatcgcgaaaaaactcgttgaagtcgcggaaaaggaaaacgcggtggccgtagcgcacggctgcacgggaaaaggcaacgatcaggtgcgtttcgaagtatccattaaatcattaaatcctgatctggaggtcattgctccggttcgtgagtggcaatggtcgcgtgaagaagaaattgaatatgccgcaagccgcggcataccgattccgatcaatcttgacagcccgtattccatcgaccagaacctatggggacgcgccaatgaatgcggtatattagaagacccgtgggcggcgccgcctgaaggggcatatgacctgacagcatctcttgaaaacacgccggacgttccggaaatcatcgaaatcgcatttgaagccggtgttccggtttcaatcgacggcgtaacctacccgctcgctgatttaattctcaagctgaacgagactgccggaaaacacggcatcggccggattgaccatgtggaaaaccgcctggtcggcattaagtcccgtgaagtttatgagtgcccgggcgccatgactttgattacggctcacaaagaacttgaggatctgactttagtgaaagaagtggcccatttcaaaccggcaattgaacaaaaactgtctgaaatcatctataacggtttatggttctcgccgttaaaagacgcgctgcttgcattcttgaaagaaacccaaaaacacgtcaccggcgtcgtgcgcgtcaagctgtttaaaggccatgccattgtagaaggacgtaagtcggaatattcactctacgacgaaaaacttgcgacatatacaaaagacgatgcttttgaccatcacgcggcaatcggtttcattgagctttgggggctgccgacaaaagtaaacagcattgtgaaaaagaaggagcagattgaagcatgaagaagctttggggaggccgttttcaaaaaacaccggaaaagtgggtcgatgagttcggcgcatccatcacattcgaccaaaacttagtcaaagaggatattacagggtctctcgctcatgcggcaatgctgaaaaaatgcggcattctgacggaagaagaagaaggcgccatccgacaggggctgcagaccctcctgcaaaaagcagatgaaggaacgcttgaattctctgttgattatgaagatatccatttgaatattgaaaaaatgctgatcgaagaaatcggaccgctaggcggcaagctccataccggcagaagccggaatgaccaggtggcgaccgacatgcatttgtatttgaaagatcatgtctcacatatcatcgtgctgattgaacagttccaaaaagcgctgatcgaaaaagcggaggccaatgtcgagaccattctgccggggtacacccatttacagcgggctcagccgatttctttcgcccaccatctgcttgcttatttttggatgcttgaacgggataaagagcgttttcgcgatgctatgaagcggattaacatatcgccgctcggatgcggggcgcttgccggaaccacgtttccgatagaccgtaactattcggcggagctgctcggttttgactccatttatgagaacagtcttgacggagtcagtgacagagattttattctcgagtttttaagcggcagcagcatgctgatgatgcacctttcgcgtttatcagaagaaatcattctatggtgctcgcaggaattcagattcattgaactggatgatacgtatgcgacgggaagcagcatgatgccgcagaagaaaaaccccgacatggcggagctgatccgcggtaaaaccggacgcgtatacggtgatatgatggggcttttcacgattatgaaagggctcccgctcgcttacaacaaagacctgcaggaagataaagaaggcatgtttgacacggtgaaaaccgttgaaggaagccttcagattttcacgggcatgattgaaacgatgaaagtaaacaaagacatcatgaaacaagcgacaaaacaagatttttcaaacgcgacggaacttgccgattatttagctaaaaaaggcatgccgttcagagaagcgcatgaagtggtcggcaagcttgtgtacagctgcattgaaaaaggaatctatttaagtgatatggcatttgaagaattccttcaagccagcagtctctttgaagaagacatctataccgtgctcgatccgcatcatgcggttgaaaaaagaatgagcgccggcggaacgggttttcagcaggtagaacaggcgctcgtaaaagcaaaagcctgcgccggcatttaatttgctgaaatttccttcatattttcccgtcatatcagacaccctacatctataaagatgggaggtagaaggaatgcgcaaagaacaagaccgttacatctatgatgaaaaagaaagtgaagaaacggccaggctcatctcagaggcatacgaaagcggttatgtcggcatggaggaagcctctgctccttcagaaaattaagctgtctataaagacggcttttttttcgtgcggacgaagtgcaaaaaagtgatattgccgtttgtttatagtaaagtagagggagaaacgtcttgattttattgaagcggcaacgttgcctggggagggtattcaatgtgcgacatgctctaatcactgccggtacaaagggattgggccgaaaagtgactgaaatgcttctggaaaaaggcttttctgtcacagtgaattacagacaagacgaagaagcggtcgcctgtctgaaggcggattatcccgggtgccatgacagattgcaattcgttaagggcgatgtaacccggaaagaagatctcatgcggatcgccgatgcagcccttcagcggtttggaaggattgacatactgattaacaatgccggaccgtacatatttgagcgcaaaaagcttgccgattattccgatgacgaatggtatgacatgcttgaagggaatttaagcgccgttttccatctgtttaaagcggttatcccggtcatgagacagcagcggttcggccggattattacatacggttttcaaggagcggatcatgcccccggctggcttcaccgttccgctttcggagcggctaaagtcggattggcttcgttaacgaaaaccattgcgattgaagaagctgaatcaggcattaccgccaatatggtctgcccgggtgatattgtaggagatatgaaagaagcgtctatagaggaagcaagacgggaaatcggcaaagaaaagacgccgatcggcaggtccggaaccggagaggacattgcgagaatcatcgcctttttatgtgaagatgattccgatcttgtaaccggaacggtcattgaagcaacaggcgggctgaatgtgattaacaggcatcaatccctgtaagttttttcgtttgtcaaaaagggaatttgataaatattaattttttatgaggtgaaaacgatgaaagtgacttatcacggacattctgtcattcaagtggaaacgaaaacccataacattatttttgatccgtttctgaccggaaacagtctgacaaatttgaaaccggaagaagtgaaagcggatgtcatcctgcttactcacggacacaatgaccatgtcggagatacagagcagatcgccaaacaaaacgatgcgctcgtcattgcgccgaacgagctggccgtttatctcggctttaaaggtttaaacgtccacccgatgcatatcggcggagcgcgccaatttgatttcggtaaagtgaaactgacacaggcattccacggatcggcggtcactgatgaagaaaacaaaaccattacgtacacggggatgccggccgggattttattgacgattgacggcaaaacgattttccacgccggggacacggcgctgttctctgatatgaaactgatcggggaactgaatcacattgacttggcgtttctgccgatcggtgataacttcaccatgggccctgaagatgcgaaactcgcggctgaatggctgagagcgaaacaggtcgttcccgttcattacaatacatttcctgtcattgaacaggaccctgacgctttcgccgaaagtctgcccggaggcgtcggcaaagtcatggcggtcggcgagaccattgagcttgcctgacatatgtgtcaaagaccttctgaatcaagcattcagaaggtctttttgtgatgccgccttttttcgggcgtctcattgcgaatgaatcccccgtacccttataataaaagcagaagactgtccttagaggtgaaacgcttggcaacaaagcatgaacaaatcctatcatacatagattcgcttcctgtcggtgaaaaaatttcggtcagaagaattgcgaaagaaatgaaagtcagtgaaggaacggcttacagagccattaaggaagccgaaaacaaaggattcgtttccactattgaacgtgtggggaccatccggattgaacagaagaaaaaagaaaatattgaaaagctgacatacgccgaggtcgtcaatgtgatagacggccaggtgctcggcggaaaagccggtctgcataaaacgttgaataagtttgtgatcggcgcgatggagcttgacgcgatgatgcgttatacggcggcggggaacctgttaatcgtcgggaaccgaatcaacgcccaccgccaggcgcttgaagcgggcgcggctgttttggtaacgggagggtttaataccgacgacagcattatcgagctggccgatatgcttgagcttccgattctctccacgagctacgatacctttacggtagccgcgatgatcaaccgggcgatctatgatcagctcataaaaaaagagattgtgctcgtggaagacattttgacgcccgcagatcggacagtgacgctgtctcctaaggataagctggagaaatggtacgaaaaaaactatgaaaccggacacggccgctttccggtgatcgatcagcagatgaaaatccacgggatcctcacatcgaaagatatcgcggggcatgaccggtcagttccgattgaaaaagtaatgaccaaaaaccctgtcacggtgatcgggaaaacatctgtcgcctcagcggctcaaatgatggtttgggaaggaattgaagtgcttccggtgacagacgggcatcacaaactgatcggaatgatcagccgccaggatgtcttaaaagcgcttcaaatggttcaaaagcagcctcaggtcggggaaaagctggatgatattgtttcaaggggatttaaagaagacgaagatgacaaaacgccggccgtttatcaatatgaagtcacgccgcaaatgaccaatcagctcggcacgatttcttacggggtgtttacgacgattttaacccaggccgccagccgatttttacgctcccgcaaacgcggcgagctggtcattgaaagcattacgattttcttcctgaagcccgtacagatggagtcggtcattgaagtgaaaccgcgcattttagaggcgggccggaaattcgggaaaatggaagtggaagtgtcaagccaaagcggcatcgtttcaaaagcgatgctcatggtgcagctgatggagagaagttaagggacgcacccgggtcccttggcattcattatgcgtggtccctctccgcttcctttgcatggatgggctcataatgcttataggctttatacccggcccatgcgctgcctgctccgattaaaatgaagacgccgccgatgaccatggtcaggacggagtgaaacagaatcatttggtttactccgtacaaaaacaccagcgcgcctaatgccatacttgatttagccgaaaaacattccttctccagcgcccgtttcgtctggattccttttactttgtaatacacgtaaaagcaggcagaaagcccgatgagaaaaacaaaaaccagcataaatgaaatcctccattatatgagtttgcaaaaccgtttataccgttgctgaaagattttccttttccatggataaagagtatgattaaatgaataaaaacgaaaaggagaaagcgatgaaatccgaactgatcagaaccatatcattatatgacaccattatcttacatagacatgtgaggcctgacccggacgcctacggttcacagtgcggccttacggaaatcctgcgggaaacgtatcccgaaaaaaatatttttgccgtcggacagcctgagccgtccttgtcttttttatattccctcgatgaggtggatgacgaaacctataaagatgctcttgtcatcgtgtgcgacaccgcaaaccagggcaggatcgacgatcagcgctaccattccggcgcaaagctcatgaaaatagaccaccatccaaatgaagatccgtatggcgatctgttatgggtcgatacgaatgcaagctccgtaagcgaaatgatctatgagctgtacctggaaggaaaacagcacggctggaaactgaatacgaaagcagctgagctgatctacgcgggtatcgtcggtgatacggggcgtttcttattcccgaacaccacaaaaaagacattaaaatacgcgggagagctcattgagttcccattttcatcgtcagaactgttcaatcaattgtatgaaacaaaattaaatgtggtgaagcttaatggctttatttatcaaaatgtgtcactgtctgaaaacggcgtcgcttccgttttcattaaaaaagacattttggagacatatggaaccaccgcttctgaagcgtcgcagcttgtcggaacactcggaaatatttcgggtatccgcgcttgggtgtttttcgtagaagaagacgatcaaatcagagtccggttccgttcaaaaggtccggtcatcaacggaattgcccggaaatacaatggcggcggacatccgcttgcggccggcgcatccatcttcagctgggatgaaaccgatcagattcttgctgatctggaagaggtatgtaacgaacacaagtagaggggagaccctctttcttagtgttcatctgtcacggggatgaaccagcagccgaattcagtcaggtcttcgtagacgcggagattacagatttggagttctttttttatgagggaagcgagtgtgtctgtttctgcatatgcggaatagccttgtctgattcgggctgcatgatcttttgccaagcgtcgttcactaaaaacctccattttcccttcctcccttcagaatcattgaaaatgtctcatctacagtttataaaaaagcggagaaaaaagcgacagatctatggaaaatttttaaaaatgacataattacgtcgcaaaagaaatatgaatttcgacagacaatctcgtataaatcgtcagttcctttacttcagctttaaattccttctcatttatggtgtatattttgttttcgatcgtccgttttaaaagctcctttgttttatacacgctttcaatatcttttgtgatgacttcagaaatattatctttcacttgttcctcaaatttcatcttgtcaggctgggcgattctgtatttttccccattgattagcttcacatcaacactttggatgagaagtctttgcttattatcctcatttaatttatgaagatccttctgatagatggagatttggttttttaaatcccgcgcgtgctcacgctgcttttcaattaacgtcacttgttcttcctgaaacgttccgtatgtaaacagaaagaacacccagctgacgatggctccgcacatcattcccgcaaaaaaacgctgccatcccggttttttataatactcgggaattctcatgatgacatattctcctgggtcagccatgaaataatcagccagccggtctgcgcgccgcccattgctgaaataattaaaagaagctgtttgaagatgtcgcgcgtgttgccttcgaacagcccccgctcgaaactgtataccgcgtcaaatgttcccccgatggccgcgacaagcgcccagatcttcagcctgttcgccaattttgtgatcgccgtcagcggaggctcgcctgataaataagctccgaggccgccgatcagcgcgccgccgagcaacacaccgagggcgataaaataactgctgatgaaattcgccataaatccggcttcctgatccatatatacaccacctcacttttctatcatattgagcgaaacggacaagtatgatgatgagtcaaaaaagaacatttgtttcttaagaaaacccgtcttataatgtagaaaggcaaaatgaacgtatgggaaaggagtggcggcattgtcttttgttcacctgcaagtacatagcggctacagtctgttaaacagcgccgcttctgtaaaagagcttgttacacaagcgaaggaactcggatattcatcattggcgctgacggacgaaaatgtgatgtacggcgccattgagttttataaagcatgcaaatcaaacggaatgaagccgattatcggtctgacggcttctatatacacggacgatacggagcttgaagcacacccgctcattcttttagcagagacaaacaccggatatcagaacctggtgaaaatctcaagtgcgctgcaatccatggcaaagggcggcatgaagcgaaaatggatgaagagctatcatgaggggctgatcgccattacgcccggtgaaaacgggtacattgaaagcctgcttcaagccgggaagtttgaagaagcggtccgggctgccgaaggattccgggagctgttcggagacggccgtttttatttagggtaccagccgtttaaaggacatgagacgttatccgaagagatcctccgcctgtcagccgagacggaaattgctgtctgcgctgcgggggatgtccggtatatcaagaaagaagatcaagatgcgtaccgctgtctgtgcgctattaaagccggagagaagtgggaggatcagagcgggaatctgccggacttatacttgagggcgcctgaagaaatggcagagctttacacgcggcatccggaagcgattgaagcagccgcgcgtatcgcccggcaatgccgggtcgatgtcagcctcggacagacacagcttccgtcttttccggcgccggacggcaaatcagccgatgactatttggcggagatctgtcatgaggggctgcgcctccgtttcggcactcctgatgagcgcgctgtccgccggcttgaatatgagctggacgtcatcaggcgtatgaaattcagtgattattttctcatcgtatgggactttatgaagtacgcgcatgaaaagggcattgtgacaggcccgggaagggggtccgcggcaggctcgcttgtcgcttactcccttttcattaccgacgtggatccgcttaaacattctctgctgtttgagagatttcttaatcccgagcggatcagcatgccggatattgatatcgatttccctgatacgagaagggatgaggtcattcagtatgtacaaaataagtacggggccatgcacgtcgcccagattatcaccttcgggacattggccgcaaaggcggcgttaagggataccgggagagtgttcggaatcagcccgaaagaagccgaccagcttgcccgcctgattccgtcaaaaccgggaatgacgcttgatgaagcgaggcggcagtccgctcagctgaacaggcggctgtccgaatccgccgttcttcataaagtgtttcagatcgcaaggaaaattgaaggtcttccgcggcacacgtcaacacacgcggccggggtcgttctcagtaaagagccgctttctgaagttgtccctcttcaagaagggcatgacggcgtgtatttaacgcagtatgcgatggatcacttggaagatctcggtcttttaaaaatggactttttaggtttgcgcaaccttacgcttattgaatccattaaaacgatgattgaaaaagagacgaatacgaaaattgatttttccgagatttcttatcaggatgaaaaaacgttctcactattgtcaaacggtgatacgacgggtattttccagctggaatcatcaggaatgagaaacgtgctgaaacgcctgaagccgtcaagactggaagacattgtcgcggttaacgcgctttacaggccgggaccgatggaaaatattcctttatttatcgaccggaagcacgggcgggcgcgtgtggaagtgccgcacgaggacgtacgaaatattctcagtgacacttacggcgtcatcgtctatcaagaacagataatgatgatcgcctcgcgcatggcagggttttcattaggtgaagcggatctgctcagacgggctgtcagcaaaaagcaaaaggacattctggacagagagcgaagccattttgttgaagggtgcttaaaaaaggagtattctgtagtcactgcaaacgaggtctacgatctgattgtaaaattcgctaactacggattcaacagaagccatgctgtcgcatacagcatgatcggctatcagctcgcctatttaaaagcgcattatccgttatattttatgtgcgggctgttgacgagcgtcatcggcaatgaggacaaaatatcgcaatatctgcatgaagcgaaggggagcgggattcaagtccttccgccgtcaataaacaaaagcggttttccgtttgcgccggaaaacggagccgtcagatacagtttgcgggccgttaaaaacgtaggcgtctcggcagtgaaagatatttataaagcaagaacacataaaccgttcgaggatcttttcgatttttgctttcgcgtacctgcaaaaagcgtgaatcggaaagctatcgaagcccttatattttctggcgccatggacgaattcaatcaaaatcgcgccgccttgctggcctccgttgatgtggctttagagcacgctgaactgtttcgtgcagacgatgaccaaatgggattgtttttggaagaatcgttctccattaagccaaaatatgtagaggctgaggaatttccgctcgtggacaagcttcggttcgaaaaagaagctctcggtgtttatttctcaagccatcctttatccgctttcagggatctcctgaaaaaacggggggcgcaagcgatcacagcagcgcggcagatgccgaaggggcagctgtcaatcggcgctttgctcgcgggcatcaaaacgattcggacaaagacaggtcagcatatggcgtttctcacattaagcgatgaaacgggagaaatggaagccgtcgtgtttcctgatcaatatagaaggctgtctccgctgttaaaggaaggcgcgcttttattcgccgccggaaaaatggaagagcgtcaggagaagacacaattcatcatgtcatccgcctctcttcttgatcagacggaggcagacagagcgccgtctgtttacatcaaaatcgaaggcagccggcacaatcaggagtttttggaaaagatgaagcgtattttactggagcataaaggggaaaccggcgtttatctttattatgaaaaagacaagcagacgatcaggctgccggatacttttcatattcaggcggaccatcaggtgttataccgtttaaaagagctgctgggccgcgaaaacgtcgtgttaaaatagtggtaacaataatcgttttgttatacaattgaaacaattgtgctatcttatttaaagattctgaaatttttcacctccagcgcttgtaccagtctatgcggcagaatatgtaacaaagtacttaaaaggagtgtttagaatgtcattaagagaagaagcgttacatttacacaaagtaaatcaaggaaagctggaatcaaaagcaaaggtagaagtcagaaatgcagatgacttaagccttgcctactctcccggagtagctgagccttgtaaagagatttatgacgataaaaacaaagtatatgattatacaatgaaggggaacatggtagcagtcgtaacagacggatcagccgttctcggtctcggtaatatcgggcctgaagcttcacttccggtcatggaagggaaagcggtgctgttcaaaagtttcgcgggcgtggatgcattcccgatcgcgcttgacacaaacgatgtggacaaaatcattgacactgtaaagctgcttgcaccgacattcggcggtgtcaaccttgaagatattgcggcgccgaactgcttcattatcgaagagcgcctgaaaaaagaaacaaacatcccggttttccacgatgatcagcacggcactgccatcgtaaccgttgccggacttgtaaacgcgctgaaattatcaggaaaatccatgtcatccattaaagttgtggcaaacggagcgggagcggcaggcatcgcgatcatcaagcttctttaccatttcggcgtacgcaacatcgtaatgtgcgactctaaaggggcgatttacgaagggcgtccggccggcatgaacgcagtgaaaaacgaagtggcgaagtttacaaaccaagaccgcaacgacggttcgctgcaggatgtcattaaagatgcagacgtctttatcggcgtatcagtcgaaggcgcgctgacgaaagaaatggtggagagcatggcgaaagatccgattatcttcgcaatggccaacccgaatccggaaatcatgcctgaagacgcgcgcgcagccggcgcaagcgtaatcggaacaggccgttctgatttcccgaaccaggtgaacaatgttctggcattccctggaattttccgcggggcgcttgacgttcgcgcgactcacatcaacgaagaaatgaaaattgctgcggttgaagcgattgcttcccttgtttcagaggaagaattaagcgctgattatgtcatcccggctccatttgacaaacgtgtggctcctgccgttgcgaaagctgttgcgaaagcagcgatggaaacgggcgtcgccagaattacggtcgatcctgaagaagtggctgaaaaaacaagacagcttacggtcatcggcgaataataacacaaaaatgaaatggcagcgcgttggaaaaaaacaacgcgctgctgttcaatatacggactgctgaaatttttttaagggcaggtcttaaaaaaaattcagcagaatccttatttcttttgaaaacgctgacagataaggctgaacaacgctttttacggtatgaaatccgtccgtttccgtctgttttgaagcaaaaaatgtcgaatggaggatgacaccgtttgacaaaaaaagtacaatagtttcggtaaagttattattaagtctatctaatcggaagacatgcagtgaagagaacccttcacaaaagggaggtaatcatttgttaaaggatatattcacaaaaaagaaaaaatatgcttccgtgccgtctgagcaggcaaaacatgatgttccggaaggcattatgacaaagtgccccaaatgtaaaaaaatcatgctcacaaaagagttagataaaaacctgcgcgtctgcatgaactgcgggcaccatttcccgatgaatgcaaagcagcgcattgaaagcctcctggatgaagattcattcgaagaattcaaccagggaatgatatctgaaaacccgctcggtttcccggaatacttagaaaaaatcgaaaaagaccgtgagaaaacatcgctgaatgaagcggtggttaccggaaaaggaaccatcagcggattcccggccgtgatcgcgatcatggattcaacattccgaatgggcagcatgggttcggttgtcggcgaaaaaatcacgcttgcaattgaaaaagcaaaagaggaaaaagtcccgtttatcatctttaccgcttccggcggcgcacgtatgcaggagggggtcttaagtcttatgcaaatggcaaagacaagctctgcattaaaactgttcagtgaggagcagggactgattatttctgtcatgacccacccgacgacaggcggcgtatcggccagtttcgcgtctctcggtgattataatttcgctgaaccgggcgccttgatcggatttgccggaagacgtattattgaacagacgatcggggaaaaactgccggaagatttccagacggcggaatttttattaaagcacggccagcttgatgcggtgattcaccgaaacgacatgaaagacaaactcgcatttctgctggacatgcaccaaacaggaggtgagcatgagtggctgcaagattagaatttgaaaaaccggtgattgaactgcagacgaaaatcgccgaactgaaaaaattcacccaagattcggagatggatttaagcgctgaaatcgcaagacttgaagaccggctcagcaagctccaggatgagatttataaaaacctgaagccgtgggacagagtgcagatcgcacgccttcccgaccggccgacgacgcttgattacattcaatacctgtttaccgacttttttgagtgccacggagacagaacatacggagatgatgcggcgattgtcggcggagtcgccaaatatcacggcatgccggtcaccgtcatcggacatcagcgcggaaaagacacgaaagaaaaccttgtccgcaatttcgggatgcctcaccctgagggctaccgcaaagcgcttcgtctcatgaagcaggcggataagttcaaccgcccgattatctgcttcatcgacacgaagggagcgtacccgggtaaagcggcggaggagcggggacaaagtgaagccatcgccaagaacctgttcgagatggccggcctgacagtgcctgtcgtttgtatcgtcatcggggaaggcggcagcggaggcgcgcttgcgttaggtgtgggcaaccgcatgctgatgcttgagaactcgacgtattccgttatttctcctgaaggagctgcatccattttgtggaaggactccgaccttgcgaaaaaagcggccgaatccatgaagattactgcgcccgatttattagaattaggaattattgatgatatgattaaagaagtgaagggcggagctcaccatggtattaagcagcaggcgggctacattgacggtattcttaaagaaacgttaaaatctcttcttcaattgaacgccgaagaattgatctcacagcgctatgaaaaatataaagcaattgggaaagtttcggttgaggatcaatatatcggggtaaactgaatagacgtgaagcctatggctcacgtttattttttgtgatttttgtgatattccttaaattttatttaaaaacaatttatttaattgtataataggtaaggtttcatgggagctcaggcgtcccttttcattgttttagggcaatgatcatgatatgtttaacatatatatgttgctgaggtgaataggaaatgaagcgtataggagttttaacgagcggcggggattccccgggtatgaacgctgcggtgcgcgcggttgtgcggaaagctatctaccacgacgtcgaagtgtacggaatttataacggttattcaggattaatcagcggtaaaatagagaaactggagcttggttcggtcggtgacatcatccaccgcggcggaacaaagctgtatacggccagatgtcctgaattcaaaacagttgaaggccgtgaaaaaggaatcgaaaatttaaagaaactcggcattgaaggtcttgtcgtcatcggcggagacggttcatacatgggtgcgaaaaaattaacggaacacgggtttccgtgtgtgggtgtaccgggtacgatagataatgacatcccgggaactgattttacgatcggatttgatacggcgttaaacaccgtaattgatgcgattgataaaatccgtgacaccgctacgtctcatgagcgtacatacgttattgaagtgatggggcgccatgcgggcgacattgctttatgggcaggtcttgcaggcggagcggaatcaattttaattcctgaagcggactacgatatgcaggaaattatcggccgtttgaagagagggcacgaccgcggcaaaaaacacagtatcatcatcgttgcagaaggggtaggcagcggggttgaattcggaaaacgcatcgaagaagaaacgaaccttgaaacacgggtatccgttttaggacacatccagcgcggcggatctccaagcgcttctgaccgggttcttgcaagccgcctcggcgcttacgcggttgagcttctgcttaaaggaaaaggcggacgctgcgtaggtatacaaaacaacaagcttgtagaccatgatattatagaaattttagaatcaaaacatactgttgaaccaaacatgtatcagctttcaaaagaactgtctatttaaggcggaagaagctgaagatttcagaaggaagtgaacgagttgaaaaaaacaaaaatcgtttgtacaatcggtccggccagtgaaagtgtagaaatgctgacaaaattgatggaagcgggtatgaacgttgctcgtctgaatttttcacacggtgatttcgaagagcacggcgcaagaatcaaaaacatcagagaagcaagcaaaaagctcggcaaaaacgtggggattctcctcgatacaaaaggtccggaaatccgcacgcacgatatggaaaacggcgcgcttgagcttcaggcgggaaatgaaattatcgtttctacgaaacaggtgctgggaacgcttgaaaaattctcagtttcttatgaaggcctggcagacgacgtgtcagcagggtctatcatcctgttggatgacggtttaatcggattggaagtgctagaatcaaatccggaaaaacacgaaatcaaaacaaaaatcttaaacagcggcacgctgaaaaataaaaaaggcgtaaacgttcccggcgtcagcgtcaaccttcccggaattactgaaaaagacgccaaagacatcgtattcggtatcgagcaaggcgttgatttcatcgctgcgtcatttgtacgccgttctacggatgtcctggaaatccgcgaactgcttgaagagcataacgcgtctgacattcaaatcattcctaagatcgagaaccaggaaggcgtggacaacctggacgcgatcctggaagtatctgacggcttaatggtagcgcgcggagacctcggcgtagagattccggccgaagaagtgccgctcgtgcaaaaagaaatgatcaaaaaatgcaacgcgctcggcaaaccggttattactgcgacacaaatgcttgacagcatgcagcgcaaccctcgtccgacacgcgctgaagcaagtgacgttgccaacgccattttcgacggcacagacgctatcatgctttccggtgagacggctgcgggacaatatcctgtcgaggcggttcaaacaatgtttaacatcgccacacgcacggaagaatctctgaactacaaagaaattctgtctaaacgcagagatcaggtcggcatgacgattaccgatgcgatcggccaatcagttgcgcacacggcgatcaatctgagtgcggcagctatcgttacgcctacagaaagcggccatacggcgcgtatgatcgcgaaataccgtccgcaggctccgattgtagccgttacggttaatgagtctgtgtcacgcaaactcggccttgtattcggtgtattcccgtcaagcggccaaaacgcgaattcaaccgatgaaatgcttgaagacgcggttcaaaaatcacttgacagcggcatcgtgaaacgcggtgatctgattgtcattacagcaggttctgtcggtgaatcaggcacgacgaatctgatgaaagtccacactgtcggcagcattatcgcgaaaggccaaggcatcgggcgcaaatctgcattcggtccggtcgttgttgcaaaaaatgcgaaagaagctgaacaaaaaatgacagacggcgcagtattggttgcttcaagcactgaccgcgacatgatcgcttcacttgaaaaagcatcagcgcttatcactgaagaaggcggtctgacaagccatgcagccgttgtcggtttaagcttgggcattccggttatcgtcggtctggagaacgcaacttcagttttaacagaaggacaggttatcacagttgacgctgcccgcggcgctgtgtatgaaggccgcgcaagcgttctttaaacagctttaaaaaagagaggggggttctcccttctcttttgtctttaggctgattttcctattcccatgcgggcggtgacgcgcttttagaagggcaggagggcagaaaaatgagagtattattcttactgtttatcgtatgtccggcaattgaaatcggtttgtttctgctggcgggaaaatggctcggtatttttccgaccttccttctcatcattttgacaggcgtgttaggcgccttggtggcaaaaagacagggaaccgatgtgtatcatcgggtgatgcgcgatctgcagcacggcaaaatgccgggggaagcgcttcttgacggaatatgcgtctttttcggaggcctgcttttgatgcttccgggttttctgtccgatattgcaggggcctgtcttctgtttccgttcactcggaaccgcatgaagccgcttttgttcaaatggctgagaggaatgtcaaaaaacaagcggatcattatcaaataaaaacggcagccttcttacagggctgctgtttttatttggactgaacagtaatataggcccatatttcttttaaagcgcccgttgtgataaaggcctgaatgaaaacgagcagcgcgggccccgcagccagtcctaaaattccgaacaatttaaagccggcaaacagagcgattaaggtcgcaagcggatcaagtccgattgacttgcttaaaattttcggctccgtcagctggcgctggataagaaccacaatatataaaacaccgagaccgatcgcttgaggaagctgaccggcaatggccaaatacataatccagggaacaaagaccgacccggcgccgagatacgggagaaggtccaccaggccgataaaaaaggcgatggttgccgcatgctcaatccctaatagaaaaagtccgataaagacaatgatcatcgtgaaaagtatgagcacggcctgcgccttaatgaaacctgccatcgcttttttcagctctcccgatacggccttggcgtttgccgaaacccgttccggaaaaatggaataaagcagcgccttcagcttatgccagtcctttgtcataaaaaaagtcgccagcattgcgaaaatgaagacggcagctgtattgggaaggaaggcaatccatttcggcaccagctccaaaagatgtgaaagcatcagccccgcatttttagctgctgtatcaccgagggtctgaatatgcgtcacgatggatgcctgctgattggtttccagtcctttaaataggacggtcagctcgtggtacaatggctgaatgcgggaagtgaacagctcttcgcaatacgtcataaaggcgctgatatgaggagggagcgttttggccagataggcggttcccgaaatgatttccgcaacgagaaatgtcgccgccccaagaagaataagcaaaaagaagaccaggacaatgacagtattgactgaccggggcagccccgtcagtttgtccagccagtcaacaacgggaatgatcgctgatgacagaataagggcgatcagaaacggataagttaacggaaatgaggcgtaaccggccgctaaagcgccgccggccgcagcgagtacaaacagcgcgcggaaaaaaacagttgcatagtgcggattcacatcgatcctcctctcggtcggcacgtcctattacattagtttattcgtcaaaaaaaaggatatgaatacagatatgatgaaagaaggtgctttcaggatgtttacacaggcgaatttatttttactattattgctggccatcgcattggtagccaaaaatcagtcattgctttttgccgtcggctttctcattgtgataaaagctgtcggtcttgatcagaaactatttccggttattcagtcaaaaggcatcaactggggagtcaccgtcattacaatcgccgttttagtgccgattgccacaggcgatatcggttttaaacagctcggagaagcgatgaaatcatattatgcgtggatcgctctcggtgccgggatcgcggttgccttaatcgccaaaaacggtctcaccttattggaaaacgaccctcatattacaacggcgctggtcatcggcacgatacttgccgtcgcgcttttcggaggcgtcgccgtcggcccgttaatcggcgccggaatcgcctacttggccatgcaaatcgttaaaatgttcacttcgtaaagtaaaaaagcggcgtaaagctgcttttttttgtggagaaaattagagtttgcaccttcgcattttatagttcagacaaatgccatttgcattattccgatgaatgaagcggcttaccatgtaacaaagaacttcgggattgacggcgcacatggagcgaaaacagcgatggcagtaattccaatgatgaatggatgaaaagctgatgggatttatgggcctgataccaaagcaaaacttgaagtgttgttaaaataagcggagaccctctttccttcaatttgaaagtttgttagatttataatgagaatgaaaaaacacaattcggttggtagtccggatgcatgatttaaaatgtcagtaaccttcccctcctcgggatgtccatcattcttcagtaaatttaggaggagggaatcgttatgaaattaacggtttactacgatggtcagttttgggtaggagtcattgaagttgtgaatgacgggaaattaagagcaattcgtcatttgtttggacaagagccaaaggattcagaaataatgcattttgttaataatcaacttttacagactctctcccacactgaacaagaaggggtttgtgttaaagcaaaatctaagaaattaaacccaaaaagattgcagcgacaagcttctaaagagatgaaaaatatcgggatatcaactaaggcacaaaaagcgataaaacaggagcttgaagcaagaaaagaaaagaaaaaacaactgaatagaaaacaaagagaaaaaataaaggaacaaaaatatttaatcagaaaacaaaaagcaaaagaaaagcataggggaaaatagttggagagcccgatgaagcccttcgattgaaaagttgagcggcatcagttagtttcttcggactgatttagagaaaaagaagtataagtcagagcccttctcgaaatgaggagggtttttccgccatttatttaaaatcacttacatcagtaaatgagtcagtttcaattgatgaacggtttgatgaggatatttacagcccgaaaacagcgcaaatgcagtcaaacgattccagtccatgtgcggggagccaactaaaaccaagacctggatttctgaagctgatccgaacattgattcagtcgagtaaacaaaataacccccttctccggtaaagaagggggttaaatttgcggtgaagttgtcgcgcctgtccttttaaagtctcctccgaaactcccccaaatgaaaacatgagaatacatggttttacaaagcgcctgaaagcaaacgattaaatttatcaacgccaagccttgatatatagggcttttaaaacatttttagttaaaagtctacaaattaatcagattattgtttataataagaataggcttaaacttaaataagcttataagaatttgttatgttcctctataagcatatcggttatgtaaccgcaaccagtgaaatgtaagcattttcttgaaggggaaagggagtgtttgcatgactcattttaagtaagccgtatgttttatatactctttaaaggggaattttgattgaaaaggagaggttgaatatgacagcaacacgcggtcttgaaggggttgtagcaacaacatcatctgtaagctctattatcgacgatacccttacatatgtagggtacgatattgacgacttgacagagaatgcaagttttgaagaaatcatttatttgctgtggcatctgcgcctgccgaataaaacggaacttgctgaactgaaaaaacagcttgcgaaagaagctgccgttccacaagaaatcattgagcacttcaaatcctatcccctcaataacgtacatccaatggctgcgctccggacggcgatttcattactcggtctgactgacagtgaagccgatgtcatgaatccggaagcgaactacagaaaagccatccgtctgcaggcgaaagtgccgggcattgtcgccgctttctcaagaatccgcaaaggacttgatcctgttgaaccgaaggaagagtatggaatcgcggagaacttcctttacaccttaaacggtgaagagccttctccgattgaagtggaagcgtttaacaaagcgctcattcttcatgcggatcatgagctgaatgcatcaacatttacggcgagagtatgtgtcgccaccttatctgatatttactcaggcatcactgccgccatcggcgctttaaaaggaccgcttcacggcggagccaatgaagccgtcatgaaaatgctgacagaaatcggcgaagtggaaaacgccgagccttatatccgcagcaaaatggagaaaaaggaaaaagtaatgggcttcggacaccgtgtgtataagcatggagacccgcgcgccaaacacttaaaagaaatgagcaaacgcctgacgaatctgacgggtgaaagcaaatggtacgagatgtcaatccgtgtcgaagaaatcgtaacgtcggagaaaaaactcccgcctaacgttgatttctattccgcatctgtataccacagtctcggcattgatcacgatctgttcacgccgatctttgcgatcagcagaatgtcaggatggatcgcccatattcttgaacagtacgataacaaccgcctcatccgcccgcgcgctgattacacgggtccggataagcagacttttgttccgattgatgaaagagcctgatcaaacgggaggctggtgattttcatgtcgttagcctcttgttaatcaagcccggattggtttacaattttgatagaatcttgagaaaagtcattttattttctatacaagaaaaataaaatgttttctaaatatgaattacatactgggaggtaatattgtgtcacaaggtgaaaaaattacagtctctaatggagtattaaacgtaccaaataatccgattatcccgtttattgaaggtgacggcacaggccctgatatttggaacgccgcttctaaagtattggaagccgctgttgaaaaagcatataaaggcgagaaaaaaatcacgtggaaagaagtttatgccggtgaaaaggcttataataaaacaggtgagtggcttcctgccgaaacgctggaagacatcagagagtacttcatcgccatcaaaggtcctctgacgacaccggtcggcggcggtatccgttctctgaacgtggcgctgagacaggagcttgatttgtttacatgcctgcgtcctgtcagatatttcacgggagtgccttctccggtcaaacgacctgaagatacggatatggtcattttccgcgagaatacggaagatatttacgccggaattgagtatgcgaaaggttctgaagaggttgaaaagctgatcagcttcctgcaaaatgaaatgggtgttaacaaaatccgtttccctgaaacgtcaggaatcggcatcaaacctgtttctgaagaaggcacaagccgcttagtcagagctgccattgagtatgcgatcgaaaacggccgtaagtctgtcacgcttgtccacaaaggaaacatcatgaagttcactgaaggggcatttaaaaactggggctacgagcttgccgaaagagaatacggagataaagtattcacttgggctgaatatgaccgcattgtcgaaaaagacggaaaagaagcggctgataaagcgcagagcgacgcggaagcggcagggaaaatcatcgtcaaagacagcatcgctgatattttccttcagcagatcttaacccgtccgagcgaattcgacgtcgtggcgacaatgaacttaaacggagactatatctctgatgcgcttgccgctcaggtaggcggaatcggaatcgcgccgggagcgaacatcaactatgaaacagggcatgcgattttcgaagcgactcacggaacggctcctaaatatgccggccttgacaaagtcaacccgtcatccgtcatcctttcaggagtgcttcttcttgaacacctgaactggaatgaggctgctgacttgatcattaaatctatggaaaaaacgattgcttcaaaagtagtaacgtacgattttgctagattaatggacggtgcaactgaagtgaaatgttcagagtttggtgaagagctaatcaaaaacatggactgaacctaaagcagacttctaatgaagccaaaaaaggagaagagaatcatgggaaaaacacgcagtaaagtttctgttatcggagcaggatttacgggagcgacaacagcctttcttacagctcaaaaagagcttgcagacgttgtgctcgttgatattccgcaattagaaaacccgacaaaaggaaaagcgctagacatgctcgaagcaagtccggttcaaggatttgacgcgaaaatcacaggcacgtccaactacgaggacacagccggttctgatatcgtcgtcatcacagccggaattgcgagaaaaccgggcatgagccgtgatgatctcgtatctacaaacgaaaaaatcatgagaagcgtcacacgtgagatcgtgaaatattctcctgactgcattatcgttgtattgacaaaccctgttgatgcgatgacatatgcggtgtacaaagaatcaggcttcccgaaagaacgcgtcatcggacaatccggagtgcttgacactgcgcgattcagaacattcgtcgctgaagaattaaacctgtctgtaaaagatgtgaccggttttgttcttggcggacacggtgacgacatggttcctctcgtccgttattcctatgcgggcggcattccgcttgaaacgcttatcccgaaagaccgtcttgatgcgattgtagaacgcacaagaaaaggcggcggggaaatcgtcaaccttctcggcaacggaagcgcctactacgcgcctgctgcatcactgactgaaatggtagaagccattttgaaagatcagcgccgcgtgcttccgactatcgcttacttagaaggcgaatacggtcatgaaggcatttacttaggcgtaccgacgattatcggaggaaacggcctagagcaaatcatcgagcttgaactgacagactatgaaaaagcgcagctgagtaaatcagttgaatctgtcaaaaacgtgatgaaagtattgtcataagaaaaaagggaaggcttccgaatcagaagccttcctctttttacaattaatgaaagcgttttcttttccctgagcgatcctttctctgaaaatgatcaaaaaggcgaattgtctgaacgggcagtattggataaaatgaaatcataaagtgatatgcagcacataaaatagagaaaattggatgtcggggaaaatagacagcggagggcgcagcatgaacaaaaaaattttagttgtagatgatgaacaatctatcgttactcttttacagtataatctggaacggtccggctatgatgtcatcaccgcatcagacggcgaagaggctctggagcaggcagagaatgaaaatccggatttaatcgtactggatgtcatgctgccgaaagtggacggaatcgacgtctgtaaacagctcagacagcagaaaatgatggttccgatcttgatgctgacagcaaaagatgaggagtttgataaggtgctgggactggagctcggagcggatgattacatgacaaagccgttcagtccgcgggaagtcactgcgcgggtgaaagccattttaagaagggctgacatttcttcgctgtcacaaggcagagaagaggaaaaggacgggcagatcctcatcggcgagctgaaaattcttccggagcattacgaagcgtactttaagtcagaacagctggaactgacgcctaaagaatttgaactgcttctgtatttgggaaaacataagggaagagtgctgacgagagatcttctgctgagcgcggtctggaactatgattttgccggggatacccggattgttgacgttcatatcagccatctgcgcgacaaaatcgaatcaaataccaaaaaacccatctatattaaaacaatcagaggtttggggtataaactggaggagccaaaaatgaatgaataaagtccgtgtgcgtctgttcgctttactcgttgtatgtatcatattggttttcagtgttctcggcctttttttacagcagcttatttcttcatccgctgaagaaagaacggcggatcagctgaaaaaggaatcggtatacatagcgggccttcttgacaccggccgaatcggcaataaaagcaatgaaacggtaatccgtgatgccggccgcaccctcggtataaacgtcgccgtgctcaacgagaagggtgacgccgtatatcattccggcagtcatgctgatgattcagccgtaaaggagttcatttctcacaataaaagtgaggaagccgtacagtcgaaaagcaaagtcatccgcggcactgccgtaaaaaatgacgccgggaaaattgcggggtatgtacttgtttcctctgagatcaacggcggttcaagcgttaccggagaaatgtggggcatgctggcagcaagtctttgtaccgcttttatcattatcgttttcttttatacaaacatgacgtcccgttacaaaaaatccatcgacgccgcgacaaaggtggcgacggagctgtccaaagggaattatgacgcccgctcctacagcggttacgcaaggcggtcggaccgtctcgggcgtgcgatgaacagcctggcggtcgatttaatggaaatgacgagaacgcaggatatgcagcgcgatcgtctgttaaccgtcattgaaaatatcggatccggtttgattttaatagacgggcgaggttttatcaatctcgtgaaccggtcatacacgaagcagtttcatacaaagcctgaacgtctgcttcggcgcctttaccatgatgcgtttgaacatgaggagatcattcggcttgtcgaagacatttttatgacggagacgaaaaaatgccagctgctcagacttcccatcaatattgagcggcgctactttgaagttgacggcgttccgatcatgggccctgacgatgaatggaagggcatcgtcctcgtctttcacgatatgacggaaattaaaaaattggagcagatgagaaaggacttcgtcgccaatgtctcccatgaactgaaaacaccgatcacctcgattaaaggatttacggaaacactgttagacggagcgatgaaagacgaaaaggcgctttcagactttctgtctatcattctgaaagaaagtgagcggctccaatctctcgtgcaggatttactggatttatccaagatggagcagcaaaactttacgatgcgcgtagagtcctttgacgccgcaaaaattctgcatgaaattgaggcgcttttgcagcataaggctgcggaaaaaggcatcagctttcagctcgatctcccggaagagccgatttttgtgacgggtgatgcgcacaggctgaagcaggtatttttgaatctggcgaacaatgccctgacctacacgcctgaaaaagggacggtggggatttcggtacatgtgaaagaaaccgttgtcgatatcaaagtgtccgatacgggaatcggcattcagaaggaagagatcccgcggatatttgagagattctaccgcgtggataaagacagaagccgcaactcgggaggaaccgggctcggcctcgccatcgtgaagcacttaatagaagcccatgaaggtaaaatcgaggtcacaagcgagccgggacaggggactgtatttaccgtgacgctgaagcggcagccggaagcgtgatcagctttacaaaggattaacaatttcttcatgacctgttaaacctatcttgttaggatgtaacagaaccccttcatccaaggagccaattttgacggcgggaacgtattttcttgttcccgtccttttttgcgttttcacggggttcgctcattttcctttcaaattgaactttgttaaaataagagaagctgtgagattaaaaaatagaggaatgacgagcttttgctcttaggaggatattgaatgacggaacgaaaaaaattagtgcttgtcgacggaaacagtctggcgtaccgggcgttttttgcattgccgcttttaagcaatgaaaaaggcatccatacaaatgccgtatacgggtttgcgatgattttaatgaaaatgctggaagatgaaaagccgacccacatgctggtggcttttgatgcgggaaaaaccactttccgccacagcacgtttaaagaatataaaggcggaagacaaaaaacgccgccggagctttcagaacagatgccgttcatccgcgagctccttgatgcctacaaaatcagccgctacgagcttcctgaatatgaagcggacgatattatcggcacccttgccgtttctgctgaaaaagaaggcttcgaagtaaaggtagtttcgggggacaaggacttaacccagcttgcaaccgggaaaacgaccgttgccattacgagaaaaggcattactgacgtggaagattacacgccggagcacgtgcaagaaaagtacggtctgacccctttgcaaatcattgatatgaagggattaatgggagattcatccgataacataccgggcgtccccggcgtcggagaaaaaaccgcgattaagcttttaaagcagttccattcggttgagaaactgcttgattccattgatgaagtcagcggaaaaaaattaaaagaaaagcttgaagaatataaggaacaagccctgatgagcaaagagctggcgacgattatgacaaatgcgccgattgaagtcaagcccgaagatttagattaccaagggtttgaccgtgaacaagttgttgccatttttaaagacctcggttttaatacgcttcttgagcggctcggtgaagaaagcggcgaaacggcggaagaaaattttgaagacatcaatgttgaaacggcagaagaaatcaccgaagatatgctcgtttcgccgtccgctttggtcgttgaacaaatcggtgataactatcacgaagaaccgatcctcggcttttccatcgtgaatgaaacaggtctttattatattccgaaagaaatcgccattcagtctgaagcttttaaatcttgggctgaagatgaatcgatgaaaaagtgggtgttcgacagcaaacgttccgtcgtcgctttgcgctggcagggaattgagctgaagggaacggaatttgacgcgcttcttgctgcctacattataaacccgggcaattcgtacgacgatgtcgcgagcgtagcgaaagaatacgggctgaatatcgtttcaaaagatgaagcggtatacggaaaaggcgcaaagcgcgccgttccggctgaaaaagagcttgccgatcatctcgcgcggaaagcgtctgccgttaacagcctccgtgacaaactgcttgacgctttggaagaaaataatcagcttgaattatatgaagatctcgaactcccgcttgcgctaattctcggagaaatggaatcaatgggcgtcaaagtggatgttgaaagactgaagcgaatgggcgaagagcttaaggcgaagctgaaagaatatgaagaaaaaatccatgacatcgccggtgagccgtttaacatcaattcaccaaaacagctcggcgtcattctgtttgaaaagctcggcctgccgccagtaaagaaaacaaaaacaggctattccacttcagctgatgtgcttgagaagctcgcagacaaacatgatatcgtcgcgcacattctgcaatacagacaaatcggcaaactccaatcgacttatattgaagggctgctgaaagtcacgcgcaaggattctcataaagtgcatacacgattcaatcaggcattgactcaaaccggacgcctcagctcaacggatccgaacctgcaaaatattccgatccggctggaggaagggcggaaaatccgtcaggctttcgtaccgtccgaaccggactggcttattttcgccgccgattattcacaaattgaattaagggtgcttgcgcatatttcaaaagatgaaaatctgatcgaagcgtttacgaatgacatggacattcacacaaaaaccgccatggacgtgtttcatgtcagtgaagatgaaatgacacaagcgatgcgccgccaggcaaaggccgtcaatttcggtattgtttacggcatcagtgattacgggctgtcacaaaacctcggcatcacccggaaagaagcgggcgcttttatagaccgctatttggagagcttcccgggcgttaaggcatatatggaagagtcggtgcaggaagcgaagcaaaaaggatatgtcacgacacttatgcagcgccgccgctacattcctgagctgaccagccgcaacttcaacctgcggagctttgcggaacggacggccatgaatacgccgattcagggaagcgccgccgatattattaaaaaagccatgattgacatggcagctgagctgaaagaaaaaaacctgaaggcgcgactgctgcttcaggtgcacgatgaattgatttttgaagcgcctaaggaagaaattgaaatattagagaagctggttcctgaagtgatggagcatgctttggcattagacgtgccgctgaaggcggattatgcttcagggccgtcttggtacgatgcaaaataaacagagaaaaaggaagtgatgattgtgccggaattaccagaagttgaaacggtccggcgcactctgaccggtcttgtgaaggggaaaacgattgaatcggcggatatcagatggccgaatatcatcaaaaaacccgccgagccggaggaattcgcgcggcagattgcaggagaaacaatccgatccatcggaagaaggggaaagtttttgcttttccatctggatcattatgtcatggtgtcccacctgcggatggaggggaaatacggtcttcatcaggccgatgagcctgacgataaacatgtgcacgtcgtgtttcacatgacggacggaacacagctccgctaccgggatgtccggaaattcggcacgatgcatttgtttgcgccgggagaggaacagaatgcattaccgctttcacagctcgggcccgaacccgatgatgaagcatttaccgctgcttatttaaaagagcggcttgcaaaaacgaaccgcgcggtgaaaaccgccctgctcgaccaaaaagcggtcgtcggcctcggcaatatttatgtcgatgaagctttattccgggcgcgtattcatcctgagacaaaagcgaacagtctgtcagacgggcagataaaaacgcttcatacagaaattaaagacacccttcaggaagcgattgacgcgggcgggagcaccgtccggtcttatatcaattctcaaggggaaatcggaatgtttcagctcaaacattacgtatacggcaaaaaggatgaaccgtgcaaaacgtgcggcacgatgatttctaaaatcgtggtcggcggaaggggtacgcatttttgcgcccgctgccaaaaaaaatcatgaactgaagcggttcaagcaggcggcagcagaatgacttttttctaacacagttgatgacctttctccatatatatattgtgattcacccaataggcatatgtcacaattgccgatcaagagaaagggagaaacggatatggagattgtttctttgctgcttttggcttttgctgtcagcttggacagtttttcagtcgggtttacgtatggtttgagaaaaatgaaaatcccgttcaaagcgattgccgtgatcgcttgctgttcagcctctgtgatgtttatatccatgctgatcggccattttctgacaaagatttttcccgtatccgtcacggaaaaactgggcgggctgatcttaatcggaatcggggcatgggtcatctggcaatttttcaaaccggataaagagccggattacttattgcatgaaaaaacgttacttaatcttgaagtgaaatcgctcggcatcgtcattcatattttgaaaaaaccgaccagcgccgatattgatcaatccggaaccattaacggagtcgaggcgcttctgctcggtatcgccttatccattgacgcgtttggcgccgggctgggagcggccattctcggcttttctccggttatgatgagcgtgactgtcgggctgatgagctcgctgtttgtttcactcggcataaacgcggggcatttgctttcaagatggaattggatagataaaatgacatttttgccgggagtcctgctgattatcatcgggatttggaaaatgtaagaaggagtgggctttttgagcttggtcatcggtttaacgggaggcatcgcaagcggcaaaagcacggtagcgcgtatgctgatcgacaaaaaaataacagtcattgatgcggatgtcatcgcaaaacaggcggtagaaaaaggaatgccggcttacggacaaattgtggaggcattcggaaaagacatcctgctggaaaatggcggtattgacagaaaaaaactcggttctatcgttttcactgacgaacagaagcgtctgaagctgaatcagatcgttcatccggcagtacgtgcggaaatgctgaaacagcgggatgaagccgttgcgcgaaaagagcagttcgtcgttttggatataccgcttttgtatgaaagcgggcttgattatcttgtcggcaaggtgctcgtcgtcaccgtaccggcagacattcagcttaaacggctgatagagcggaattcccttacagaagaagaagcgatgagccggataacgtcgcaaatgcctttagcggataaaacaaaaaaagctgacgccgtcattgataacagcggcagtcttgaatatacaaagcaccagcttgaggaagtattgagcggctgggcataaacaaacaccgttcggaaagccgaacggtgtttttctggttaaaaatcaaaattgtcaggatcaggaccgacacggagattttcgttcagatcatcaatccgcttcatatcgtcagctgacagttcgaaatcaaagacatttgcattttcttcaatacggtgttttttcgttgatttcggaatggtgatgacaccgttctgcaaatcccagcgcaaaatcacttgagcggctgatttgccgtacttctcagcgatttcctgtaagacggtgtgatcaagcagctgaccttgcatcaatggcgaccacgcttcaagctgaatgccttgttcagtgcagaaagcaagcagttctttctgtgtcagacgaggatggtactccacctggttgatcatcggcttgatttcggtctctttcatgagatgtttcagatggtgaatttggaaattgctgaccccgatcgccttaatgcgtccatcccggtagagggtttcgagcgcccgccacgcatcgatgtactttccttcgacaggccaatggatcaaatataaatccaaataatctaaaccgagtttttctaagcttgtgtcaaacgcttttaacgtttcttcatatcctaaatcggcattccatacttttgacgtgacaaaaatgtcttcacgttttaatcccgcttcttgcagcccttggcggatgccttcgccgacaccttcttcatttccgtaaatcgaggcggtatcaacgctgcgatagccgtgcaccaatgccgttttcaccgcgttgacgagttccgcgccttcctctactttgaaaactccaatgccgaaccaaggcatctctactccgttatgcaatgttgcttttgcttgtaaatgtgttgtcatgtatatattcctcctattagttgtctgttgaaacaatcaaaatgcgctgaagaaaaactcacctcctttcaagggcagtgcgatcccgcttttcaagcttcctgctccatccggttaatacgaccgcgctgagcaccatcagcgccccgatccaagcggtatgaatgactccgattgagtctgtaatgattccgccggcaaacgagccgatcgcgattccggcattaaatgccgcgatatttaaggctgatgctgtatcaacggcgtttggcgcaaaacgttcactcagcatcacaacatatacctgaagccccggcacattcataaacgccaacagccccatgaaaataatggtgatcagcccggctgttttaaacggcgcggtaaaagtcagaacaaacagcacagcagcctggacaatgaacatataaaacaaggctttcagcggatttcggtttgataaacggccgccaatcatgtttccgatggcaatcgcaattccgtaaatgagcaggatggccgcgacggtttctttctgaaaaccggttacctcctgaagaagcggagataaatacgtaaacacgacaaacgttccgccgtagcctaacgcggtaatgataaataaaagcaataaccggccgtttgtgacgagtttgacctgctcggcaaatgcggttttcgtccctttgcgcaaatgtgacggaacgagaagcgcgtttgtgaggaatgcgatgattcctaccgccacaatgacggcaaatgcaatcctccatccgaattgctggccgagataggtgccgaacggaacaccggtcaccgtagccaccgtcagccccgtaaacataatggaaatcgcgcttgctcttttatgctccggcacgatattggcggcgattgttgccccgattgacatgaaaatgccgtgggaaaaagccgaaataacccgtgccgccagtaagacgccgattgaggaagcgctcgctgcgagtgtatttccggcaataaaaattaacatcacccagagcagcagcgttttccgcgacatgccggatgtgagagacgttaaaaccggcgcgccgaatgtcacgcccagagcatacatggaaacggtaagtcccgccgttgtcacaggtatatgcagatcttgagatataagcggcagcagcccgacgctgataaattcggttgtgccgatcgcaaaagcgctgacggctaatgccagcagcgctggtaaatagctttggcgatgtgaagacatctgttttcctccttgaacgataatgtatggttgaaatgatgccgggtaaacgatataagtataagagtacattccttttcagccggcaaatgtcattatgatcgatagaagtgtcattgaaaagaacgtacttttaagtgccataggcactttttagttcctatagatgaggaggaattaccgttgctgaagaaaaaatacaatatatccgtagaggcggcgcttgaagtgatcggcggaaaatggaagtgtgtgatcctctgccacctcatgcgcgggaaaaaacggacaagcgaattgaagcggcttatgccggacatcacccagaagatgctgacacagcaattgcgagagctggaagctgacggcgtcatcaaccggatcgtatacaatcaggtgccgccgaaagtggaatacgagctgagtgaatacgggcacagtctggaaagaattttaaatgcgctgtgcgactggggcgcgatgcatattgctaaacggtacggcgaggtgtcttccgttttagaggacagcattttaaatgacaaatttaaagaaccgggacaaatataagaaaaaagcaggcagcctgagacgctgatcctgctttttttatggaagaaagatcattttatatgcaaaaaaaccgattgaacaacatattgatcggtataagggtggatttttatcaagttgtactggcggatttcttttaatgtgttatactatatataaataaaggtaaattagagtggcatattaaaaaggggtgacctgagcatgaaggtaaaagtagcaatcaacgggtttggaagaatcggaagaatggtgttcagaaaagcaatggaagatgatcaaattcaaataacagccattaatgcaagctatcccccggaaacgcttgctcatttgataaagtatgacacaattcacggcaaatacgatcaagaagttgagacctccgacgacagcctgatcgtcaacggaaaacatattatgctgttcaatcgccgggacccgagagagcttccgtggaaagaatgcggaatagacatcgtcgtagaggcaacggggaaatttaattcaaaagaaaaagcaatgagccatattgaagcaggggcgacaaaagttattttaacggctccgggcaaaaatgaagacgttaccattgtcatgggagtaaatgaagagcagttcaatcccgatgaacatgtcattatttcaaatgcatcctgcacgacaaactgtcttgcgccggtcgtcaaagtgcttgatcaggaattcgggattgaaagcggcctgatgacgactgttcacgcttacacgaatgatcaaaaaaatatcgacaatccgcataaagatctgcggagggcgagagcgtgcggagaatccatcattccgacttctacaggcgccgccaaagcgctgtcgctcgtgctgcctcatttgaaaggaaaacttcacggtctcgctttgcgtgttcccgttccgaatgtgtcattagtggaccttgtctgcgatctgaaaacagatgtgtcggccgagcaagtgaatgccgctttccaaagagccgcaaaaacgtcgatgtacggaattcttgattattcggatgagccgctcgtttcttcggattataatacgaattcacactctgcgatcatcgacggactgacaacgatggtgatggaagaccgaaaagtaaaggtactcgcctggtatgacaatgaatggggatattcctgccgggtcgttgatcttatccgtcatgtcgccgcgcgaatgaaacacccgtcagctgtgtagactaaagatcatggacatttgttagaaaaaaacccttaacggcatattcgcaaaaaacacaccttgcaaaataaacttaaacacagtatactatctttcgtgaacttcttgctcgtgactgcttcggaattacttaaagggttaggacctctccggactaactttcccccgtggtaaatggccgggtcagttctcggaaattcacttttttaattcttgttaaggggggtccatgattatggaaacaatggggcgtcacgtcatctccgagctgtggggatgcgattttgataagctcaatgacatggattttattgaaaaaacgtttgtaaatgctgctttgaaatcaggagctgaagtgcgcgaggtcgcatttcacaaatttgcaccgcaaggcgtaagcggagtcgttattatctctgagtcacatttaacgattcacagttttcctgaacacggatatgcaagcattgatgtttatacttgtggagacctggatcctaatgtggctgcggattacattgcggacgcattacatgcagatacaagagaaaacattgaaataccgagaggaatggggcctgtacagattaaacaggcacaagcgaaagtactgtaattttcaaaacgcaaacacaagggagctaagctgaaaaagccattacgcgctttgaagctgatgctccttttctaatgtaaaaaaacagcattgctttttctttaagcattttttttgtaaaatagaaaagataaggccggtctatcggctctcccaacaaataggctcatcctagaaacgttggcgggcatttaccggaagcttgcgaaccgcattacagcaacgaaacagatgggagctgatccaatttgaaatgtccttcatgccagcacaacggttcccgcgtacttgattcacggcctgcggacgaagggaaatcaatccgcagaaggcgggaatgcgaagcctgccattaccgcttcactacatttgagaagtttgaagagatgcctctgatcgtcgtgaaaaaagaaggcgtccgggaagaattcagccgtgaaaaaatgctgcgcgggttaattaaagcttgtgaaaaaaggcccgttcctttaaaaacattggaagacatgtgctttgacattgaaaaagagctgagaaaccaaggtgtatctgaagtcaaaagcgaacttgtcggagaaatggtaatggaccgtctggcgaaaatcgatgaggtgtcttatgtccgctttgcctccgtctaccggcagtttaaggatataaacgtgtttatcgatgaattgaaagatttaataaagaaagaacgctgagagagctaagagattgtgtctggctcttttctcatgagcaaaattggcatttgatagatcgcagaaacggtgtaaaatgagagtagaaacatatcggaaggtttgagaatcatggctgactattggaatgacgtattgcctgtagatccttatacggtcaaaagccgttcgcttcttcaggatgtcgacagacaggttttgacacatctgtaccagccgctgatcggttcttttgcattctccctttatatgaccttatggggggagcttgagcaaaaccgcttgtggggagcggaatccacgcacaggcagctgatgggcatgatgcagtcaaatttaaaaaagattcatcatgaacaggggaagcttgaaggaatcggactgctgaaagtgtatatccgggagtccgagcaaaaagagcggatgtttatttatgagctgctgcccccgctcagaccgaatgatttttttgaagacggcatgctgaatgtctttctttataacagagtcggtaaaacgaaataccagcagctgagacaattttacacgcacccttccgtcggcgcggacgcaagggaaattacccgtccgtttaatcacgcttttgcctcttttcagccgagtgaatggaaaatgacgcctgatatggaagaggcgatgaagctccccgaggactatgagacggcgtctgtcggacaagcgccttcctatacggtgacggaggaagtatttgattttgagcttttcatggcgggactgtcagaaacgatgataccgcgtaaatcaatcacgcaggacgtgcgggagagcattaaaaagctttcatatttatacggaatagatcctatctccatgcagcacgtcgtcatgaccgcaattaatgaacaggatacgataacggccgaagcgctgaggaaagcggccagcgactggtaccaaattgaaagaagcggtaagcttccggaactgattgataaaacacagcctgtcaccttgagagaaaaccggacggaaaaggacgattcattgaacggcgaactcatcgcccagcttgagaccatatcaccgagaaagcttcttcaggacattgcggacgggaccgagccgtcaaaagccgacttgcagattatcgccgatattatgttcgaacaaaagcttgagcccggcgtcaccaatgtgctgatttattatgtcatgctgaaaacggatatgaagctgtccaaaaactatatccaaaaaatcgccgcccactgggccagaaaaaaagtcaaaacggtacgggaagcaatgaagctcgcaatagaagagcacaggcaatatcttgattgggcggacggcaaaacaaacggcgcggcgcgcggcaaaaaaaccgtccgggaagaaaagcgccctgattggatgaaagaagaagaaaccgggaagaaacaagaacagccggctctttccgcgcaggatcttgaagaacagaagaaaaaaatgatggaagaaatgaaaaaactgaaaaaatactctgcctattgagacagagaagcggggtgatattgaatggaaccgatcagccgatccttagaaggcgtgacgaaaagacctgactttcaaaaacgcctggaacgaatgcagcagcaagtcatggccgacgaagacgtccaggcttttttgaaggaacagaaagatgtaatcaatcaaagcatgattgacagagggttaaataaactgtacgaattcgttcagcaaagcaaacagtgcgccttctgttcgaaagacagccggacgaacagcctgcttgaaggctatcatccgaagcttgtgatcaacgggcgttccatcgatattgaatattacgaatgtccggaaaagagaaagctcgaccgccagaaaaggcaaaagtccctgatgaagagcatgtatatccagcaggatcttctcggcgcgacgtttcagcagatcgacattaccgatccgagcagagtcggcattttccagcatgtgacggattttctgaagagttataatgaaacaggaaaaggcaaagggctgtatctgtacggaaaattcggaatcggaaagacatttattttagccgccattgctaacgaactggcggaaaaagagtattcatcaatgatcgtatatgttcccgaatttgtcagagagctgaaaaactcgctccaggatcagtcgttggaggcgaaactgaatatggtgaaaacgacgcccgtattgatgcttgatgacatcggagcggagtcaatgacaagctgggtcagagatgaggtcatcggcaccgtgcttcagcacagaatgagccagcagcttcccactttcttctcgtctaatttctcacctgacgagctgaagcatcattttacgtattcacagcggggagaaaaggaagaagtaaaagcggcaagactgatggagcggattttatatttggcttcgcccgtccgtcttgacggggaaaaccgccgccgttcatgatgccggcgtccaatgggaaggatttgagggaatgaggaataagaaggctgtcacttgggctgcggctgcggcgggagcgggccttttgctgtgggcaaaccgcaaatatctgaatctgtcgcctaaggagatccggctgtgggtattatcgttcggtgtttttgcgccgcttgtgtttatcggaatttccatcgtcaggccttttgtgctgtttcccgtatcaatcgtttccgtcgccggaggattggcgttcggcccgtttttcggcaccgtgtatacgctggcgggctcaatgggcgctgccgccgcgtctttttttgcggcggggctgtttgcctttaatgagaaaagccgccatggaaaaatggaagtcattcaaaagcagatgaaaaccaatggcttcttttatatttttatcctgcgtattctgcctgttaactttgatgtgatcagctatgccgcgggcctatcgaaagtcaggccgatgacgtattttttggcgaccgcagcgggtatcattccggggacgatcgtcctgaatgtgctcggcgcgagctttatgtccggcaatgtgctgaccgtactcggcgtgatctgtctttacatcgtatttttatcgcttcccgttatatttaaaaagaaggtgcgccatttgttcggcggtgaaagctaacctttacgtctattttaaaaacatcccccatatacttgtaacagatgccgtaaggggggacaaatatgcttgaagtgatctttgaagatgaccacgataccgccgcttttttacatctcattcagcaatcggacgaccggagacattttattgtccgtgaaggcataaaaaaagtcggaatcgcaaggtctgaaacggctttttgcgttcagcgctttattgagccgatacttgtcaggttttttttggaatgcaaagaagacgagcatatgctttcgcttattgaggacgcatactgcttcaccgatcaggatgaacagcagcaaatccttcagcttgcacacagcattatggaaggagagcttgatgatcatccgttcgagccgaagaaagagccgcgcacacagtttatttcagatgcgctccggacgatttcacttgatgcgggtgttttttccgtgcgttcgtttcagacgttccggctcggcaggtattatgagcggctcagagaatacgcggaggctgcgatagatgaatatcggatggaacaggaatatcaaaactttatccagtctctgagagattatgtgacatccaatccgccgcggatgaagaaagtccgcatcgtacatgaccgggcttttacgctgtgggagctgcgctatttgtcagaacgggaacagaaaaaatacatagacagacggtttgtgcgggagcacccgatgtatatagattcccatctccttgcgccgctgatctccattgcgcctgagacggtagaactgtatacggacaaaccggagcatatgatgtccagaacgattcaaaacgtgtttcaggagagggtgcgcctttttccgctgggcgcgtttgcagccgagaagacggaaggatagccgcacggacggccttgtgtaagcggcagggctgtctttgcgaaatcagacggaaaaccgagttgcatttttctcgcagacattttataatacataaaagattaatgattgctacacgtattgataaggacatgaagcattgataccggctttataagagaggagagcccaggctgaaagctttccagctatggatcattgtctttaccgcctttgaacttcagctgtgaacgccggaagaagcgccagtaatagctgacgggaactcccgttacagagcttagagccgcaggtgccgaagcaatcggccgcgcggaaaaaagggtggaaccacgattccgtttatttaacctcgtccctttcatagggggcggggtttttgatttgcataaaaaaaggagtgacgaagatgtcagatatgatcaacatcacatttccggacggagcggtaaaggaatttccgaaaggaacaacaacagaagatatcgcggcatccatcagtccgggattaaagaaaaagtctttagccggaaaactgaacggacaggaaattgatttaagaacgccgattcaagaggacggtgcggtagaaatcattacagaaggcacagaagaaggtttgaacatcatgcggcacagcacggcgcatttattggcccaggcgattaaacgcatttataaagatgtgaaattcggagtcggccccgtcattgaaaacgggttctattatgacgttgaaatggaacaggcgctgacgccggatgaccttccgaagattgaaaaagaaatgaaacggatcatcggtgaaaatctgccgatcatccgaaaagaagtgagccgtgatgaagcaaaagccatgtttgcggaaatcggcgataatctgaagcttgaactgctggatgcgattccagaagacgaaacggtctccatttatgagcagggcgaattttttgacctgtgccgcggcgtgcacgtgccgtctacaggcaaaattaaagaatttaagctgctgagccttgcgggcgcatactggcgcggcgacagcaaaaaccaaatgcttcagcgcatttacggcacggccttctttaaaaaggatgacttgaaagagcatttgcgcatgcttgaagaagcgaaagagcgcgaccaccgaaaactgggcaaagaattaaaattgtttgccaactctcaaaaagtcggacaaggtctgccgctctggctgccgaaaggcgcgaccatccgccgcgtgatcgagcgctacattgtggataaagagctgagcctcggttatgagcacgtctatacgcctgttctcggaagcaaagacctgtacgaaacatcgggccattgggatcattatcaggatacgatgttcccgccgatggaaatggacaatgaaacactcgtgctccgtccgatgaactgtcctcaccatatgatgatttacaagcaggacattcacagctaccgcgagcttccgatccggattgcagagctgggaacgatgcaccgatacgaaatgtccggggcgctttcaggtcttcagcgcgtacgcggcatgacgttaaatgacgcgcacattttcgtccgccctgatcagattaaagaagaattcatccgcacggtccgtttgattcaagacgtatacgaagacttcggcctgaatgattacacattccgcctgtcttaccgcgatcctgaagacacggaaaaatattttgatgatgatgagatgtggaacaaagcgcaatccatgctgaaggcggcaatggatgagatggggcacgactattatgaagcggaaggcgaagcggcgttttacggccctaaacttgacgtgcaagtgaaaacggcgatcggcaaagaagagacattgtcaactgtacagcttgacttccttcttccggaacgctttgatctcacttacgtcggagaagacggcaaacagcaccgtcctgtcgttattcaccgcggcgtcgtgtcaacgatggagcgtttcgttgctttcttaatcgaagagcacaaaggcgcccttccgacatggcttgcgccggtgcaattccaagtcattcctgtatcaccgtccgtgcatcttgactatgcgaaaaaagtgcaggagcgcttgcagcgcgaaggcctgcgtgtcgagcttgacagccgggacgaaaaaatcggctataaaatccgtgaagcgcaaatgcaaaaaatcccgtacatgcttgtggtcggtgaccaagaagcggaaaacggcgcggtaaacgtccggaaatacggcgagcagaaatcagaaaccgtctcattggacgattttgtgaaaaaggctgtagccgaagcgaaaaaataaccggaaatacaaaaaccccgttcattcagaatggggtttttttgcgtataacattatctttctttttgtttctctataatcgcaaacagctcgtgaagatcgctgatcacgtaatcaggcgcaatgtccgtatcatttttcttttgcgtccggtttacccagactgtcgtaatgcctgcccgtttcgctcccaatatatcagtattgaggttatctccgaccataatggcgtcttcttttttcaggttcaggaggccgaggcaatgttcgaatatggaggcgtcgggtttcccttttccgaaagcgcctgagatgacgatttcattaaaataaggcgcaagctcaggaacgccggcgagtttttctttctgcaggctgggatcgccgtttgtcagcagaagcaattcataaacacctttcagcttatcaagcaccgcaaacgtttcatcatacacgtacggacgctgtctgcgttccgccgcgaaaaattccgctaaatattcgccgtaagccgcatcgtctataccgacgctttttaagccgttcgtccaggcgtttcgtctgtattccggggcaatccgattcagctgtttaaatccttcgctgaccggctcggaaaaattcgcccataatccttcaaatggattaatgccgatcatgaccgtataaggataggtttcgtatgacatatacaattcccgtgccgctttccgaaccgcatcttcaaatgtatgcgggtcaaggccatattttttttccgcttgtaaacatgtttccctgaatgttgttctgacgcttttttcatcccataacagtgtatcgtccaaatcaaaaaatacggctttcatgatcttctcctctttgttatattctgaaactctctgccgcaaggctcccgtttattctacaatagatatatagactgtgaaagatttgttttcagatgatttgaaaaaaacaggcaggtttgtgtcagattctgtctcaggctctaaaacgtgataaaataaaatttgaaagaacaggtgaaaagtatgctgcatttgatcatcatgatgctggaaagagtcggaattatcgtcatattgggatttgttctggctcataccagattgttcagacaggcgctccagcagcctgagagctataaaggcaaagcggtgctgatttcaattttctcgctgttcagtatcatcagcaactatacgggaatagaaattcagcggaatacaatcatgaataatgactgggtgtttcaaattaatccgtccggttcaattgccaatacaagaattatgggcgttgaaatcggcggactcttaggcggcccgtatgtggggatcggcgtcggcatactggccggcctgcatcgtttatcactcggcggcgcgaccgcagtcagctgtgccgtctcatccgttttagcgggcattttgtccggatggatcggacggtatttcagaaaacgctatgcgatgccgacaccgcgggtggccgcgcttgtcggactcggaatggaatcgctgcaaatgctgctcatcctcttgatggccaagccgttttctgatgcttggacgcttgtgagcatcatcggcatcccgatgatattggtaaacgggtcagggacttttatttttctttcgatcattcagtcgattatccggaaggaagaacgggcgagagcccttgaaacccacagggtgctgatgattgccgaccagacgcttccgtttttccgccaggggctgaatgaaagctcatgcaaaagcgtcgccgccatcattcacagtcaaacaggaacggacgcggtatcgcttacggataacgaaaagattttggcgcacgtcggcgcgggtgccgaccatcatattccgtctgaaagcctgatcaccggattgtcaaaacgcgtcattaaaacgggtcatattatgaaagcgacatcaaaggaagaaattgaatgcacgcacgatccctgtccgctgcatgcggcgatcgtattgccgttgacgtcaaacggcaaaacgatcgggacgttgaagatgtactttaaaagcccgtcaggtttaagccgggttgaagaagagcttgcagaaggactcgccatgctgttttccactcagcttgaactcggcgaggcggaactgcagagcaaattgctgaaagacgcagaaataaaggcgcttcaggcacaggtcaatccgcattttctgtttaatgcgatcaatacgatttctgctctttgccgtacggatgtggaaaaaacccgaaagcttctgctgcagctcagcgtctatttccgttccaatctgcagggggcaaggcagctgctcatcccgctttctaaagaactgaaccatctgcaggcgtatttatcattggagcaggcccgttttcccgggaaatataaaatcagtcttgaaatcgaacgcggtttggaggacatcgaaattcctccttttgtgctgcagattctcgtcgaaaatgcgctccgccatgcattttcaagaaagcaggacagctgtgccgtcaatgtcagcgtggtatccgccggtcaatcggttttaatgcgggttggagataacgggcggggaattgatccggaattgctgtccgtgctcggaaaccgtccgctgccgtctaaagaagggacgggaaccgcgctttacaatttaaatcagcggctgatcgggctgttcggccccaaagcagctctgcgattggaaagtgaggccggcaaaggtacggacgtatcatttgagctgcctttgaaactgatgactaaaggagaagaacatgctgaaggtgttaatcgttgatgatgaaatgctggcaagagatgaattagcttatttgctgaaacggacgaatgaagtaagtgacataaacgaagctgaaaatattgaatccgcttttgacagtatgatggatcaaaaaccggatctgctgtttttggacgttgatttgtcaggagaaaacggatttgacattgccaaacggctgaaaaacatgaaaaatccgccggccgtcgtttttgcgacggcgtatgaccaatttgctttaaaagcctttgaagtcgacgcgctcgattatttaacgaagccttttgatgaagaaagagtgcgccagacgatcagaaagtttaaaagagtgaagcgggacagggcaggagccgtctcagagcagccgtccgcagccggagcgcataaactggctgtatcagccggtgaatctattgtcattttagatacgaaggacattatttacgccggcatggaggacggacacgtttccgtcaaaacgtttgccgcgtcttattccgttcatgaaactttggcggtcattgagaaaaaactgcctgatacgggtttcttgagagtgcaccgcgcgttcatcgtgaatacggagcatattacggaaattcatccgtggtttaattcgacgtacaatcttatcttaaaagacggctctaaaattcccgtcagccgtacatacgccaaggacttaaaaaagctgcttcatattatatgaggcggcttttgcatttcagcagccgttttttgcatttcagaatgaatattcagccgtttgttatgaaagcgcttcaaaaggcgatttctcttttataatggacctaacaaagagaaagaggtgaagaaaatgagtgcgaaaaaagtgtacggatttctgacacaagcatttatttttgccgtaattatgctcatatctaatgggattgcagcgattgtccccattcctatacccgcttccgtagtaggtttggtgttattatttgtcctcttatgcctgaaagtgattaagcttgaacaagtagaaacgctgggaacatcattaacgtcactgatcggatttttatttgtcccgtccggcatctccgtgatgaattcacttggcgtcatgcagcagtacggcgtgcagatcgcactcgtcatcttactcgctaccatcattctgttaggggcgacgggccttttttctcagctgatcttgtctgtcagccaaaaacgtcagaaggcagcccctgaaaaacaaacggtgcgccgttccaatcaggaaaaagaacttgtgcagcattaggagggaaatcggatgagtccatatttcggtattgtcgtttcacttgcggcctttggcatcggcacgtatttatttaaaaaaacgagaggctttttcctcttcaccccgctgtttgtcgcgatggtgcttggaatcctttttctgaagctcggcggtttttcatatgaagattataaaagcgggggagacattattagattcttcctggagcccgcgacgatcgcttttgccatccctttatacaaacagcgtgacaaactgaaaaaatactggtggcagatcatgtcttctatcattgtcggctctatctgctcagttacgattgtctatttgatcgcaaaaggcattcatcttgacgcggccgttatgaaaagcatgcttccgcaggcggcgacaacggcaattgcccttccgctgtcaaaaggaatcggcggcatcaccgacatcaccgctttcgccgttatttttaacgccgttatcgtctatgctctgggcgctctattcttaaaactgtttaaagtaaagcacccgatctctaaaggactggctctcggcacatccggacacgcactcggtgttgcggtcggtattgagatgggggaagtagaagcggcaatggcaagtatcgcggttgtcgtcgtgggagtggtgacagtgctggtcattccggtattcgttcagctcatcggaggataaacccgggtcatagacccgggtttttttattgtgttggcacgtccgcgtgcggcaaagaacgaaatttcacatttttccttgcgctcgccccggcatcgtgttaaaatgaaaaagttgatccggagaagtcattcttgactaatgatccggtattgtgtagaatagttattgaattgaatataaatcacaagcagaggcacccgcttctcacctgattgacacattcatgtagttggcaggttgaccgtacatttttatttatgcagatgttcgtagtgtgggtgtgttgtcatgcccgcactttttgtttgcctgcagaatgcagtcaacaagcgttgtgaatcaattcgaagaaactatggaggtggctcattattagcaaagatcaattggttaatgagggtatccgtgcacgtgaagttcgtctgatcggacaaaatggcgatcagctcggcatcaagtcccgtcaggaagcacttgaaatcgccggccgcgcaaatcttgaccttgtgttagttgcagcaaatgcaaaaccgcctgtctgccgcatcatggactacggtaagttcagattcgagcagcagaaaaaggacaaagaagcacgcaaaaatcaaaaaatcattaacttaaaagaagttagattaagtccgacgatcgatgagcatgactttaacacgaaattgcgcaatgcgattaaattccttgaaaaaggcgataaagtgaaagcttctatccgctttaaagggcgcgcaatcactcataaagaaatcggccagcgcgtattggaccgtttctctgaagcatgtgcggaagttgcgacagtcgaaacaaaaccaaaaatggacggccgcagcatgttcttaatgctcgcgccgaaaaacgaaaagcaataaggaggaaatcccatgccaaaaatgaaaactcaccgcggatctgctaaacgttttaaaaagacaggttctgggaagttaaaacgttctcatgcatacacaagtcacttattcgccaacaaatcccaaaagcaaaagcgtaagcttcgcaagggtgctattgtgagcgcaggagacttcaaacgcattaaacaacagcttgccaacatcaagtaatcggacaaggaacaattaggagggaaatctaatgccaagagtaaaaggcggaactgttacacgtaagcgtcgtaaaaaggttcttaaattagcaaaaggttatttcggttcaaaacatacattatacaaagtagcaaaccagcaggtcatgaaatcaggaaactatgcattccgtgaccgccgtcagaaaaaacgtgatttccgtaagctttggatcactcgtatcaacgctgctgcacgtatgaacggtctttcttacagccgtttaatgcacggtcttaagctttcaggcatcgaagtaaaccgcaaaatgcttgctgatcttgctgtaaacgatcttactgctttcaatcagcttgctgatgctgctaaagctcagttagacaagtaagttgaaaaagccgctctctttccgggagcggtttttttacgtaaagggtgacaatcaatggctctcttcatttacgccgtattgataaacggatacggcttttggatcatgggcgctgataaaagaagagcaaaggcgcacaggtggagaatatcagagaaacgaatatggctcacagccgccatgttcggctcactcggcgtatggatcggcatgcgcaccttcaggcataagacgaaacacaaatcctttttatacggggtgccgctgctttttctcactgaagccgtccttgtgctgatgtatttgatgtataaaacataaaaaaagcaggagagcttatcgctcgcctgcttttttcgcttttttgatgggctggtcccaatcaatcttgcaattcgggtaccgctccaatacctttttttcgacttcttcaaaatcacctgcagaaaagcggttcagcttttccggattttcggtccatacaaaaatcgtatgaataaacagcggatgatctttggaagggatatgcttttctccttcaaagagcactcctttataagtaagctggagattttttcgcgtgtttttctgttcgtcaataaaataaaaattctcttttgattgcgccagtctgagccttcttttcgggtttgcgtaaaatttgacgcccatgtaaataaaataaataagaagtgcaagcaagacaatcctcaatactgtaatggccatatgtgtgaaggcacctcctcacctttgtcatgatctgatgtaatacgaaaaacaaaacaaaaggtttcatttttttaaaagaaatagataaaaacatttacccgtttttcaggcgaattaatcgtatgcttcagcattggttttgtataataagaagggtagtgaaaaaaaggaggtctattgatgacaaaattagatgaaacgctcaccatgctgaaagcgttaacggatgcaaaagggataccgggaaatgagagagaagtaagacaagtgatgaaatcatacatagaaccatttgccgatgatgtcacaacagaccggctgggaagcttaatcgccaaaaaaaccggcaaagaaaacggtccgaaaatcatgatctcagggcatttagacgaagtcggttttatggtgacacaaatcactgataaaggctttctccgctttcaaaccgtcggcggctggtggtctcaggtcatgctggcccagcgcgtcaccgtcgtgacaaaaaaaggggacatcacggggatcatcggttcgaaaccgcctcacattctgcctcctgacgccagaaaaaaagccgccgatattaaagagatgttcatcgatatcggggcgtccagccgtgaagaagcaatggaatggggcgttcttccgggtgaccagattgtgccgtattttgaatttacagtgatgaacaatgaaaaacatttattggcgaaggcatgggacaaccgtatcggctgcgcgattgccatcgatgtattaaaaaatctgaaaaacagcgatcatccgaatgaagtatatggggtcggaacggttcaggaagaagtcgggcttcgcggggcgaaaacagcggcacatacgatccagcctgatatcgcgttcggtgtggatgtcggaattgccggagatacaccgggaatttctgaaaaagaggcgcaaagcaaaatcggcgaagggccgcaaattattctgtatgacgcgtcaatggtatctcacaaagggctgcgcgaccttgtcgtgaacacggcggaagaagcgggaattccgtatcaattcgattccattgccggagggggcacggattcaggttccattcatttaaccgcaaacggagtgccggcgctgtccattacgatcgcgacgcgttacattcacactcatgccgctattttgcatcgggatgattatgagaatacggtaaaattgattacagaagtgattaaaaaattagaccgggaaacagttgaccgtattacttaccaataaagatacggaagaatctgcttttttaagtagattcttttttttgtctgtacaaatatgagccctgcgtctacaataagagaagacatagaaaaatctgacaacatgtttttgaaagcgctttaaaaaaggggagggtttacaaatgaaaaacagattcagacgcatgatccgcttttcgtgcgcagccgttacagccgggctgctgctgatgtcttcatctccggcatctgccgcgttttggggggcatcaaatgaattgcttcacgatccgacaatggcgaaggaaggaaacacgtggtacgctttcggaaccggtttggaaggggagagggggattcgcgtcttaaaggcgggcagcggcggcgtatggaccgttcagaaatcaatctttacttccccgctgtcatggtggggcaattatgtgccgaattacgggctgaatcaatgggcccccgatgttcaatattataacggaaagtattggctgtattatgccgtttcttcattcggcaaaaatacctccgcgatcggtcttgcatcatctgcaagcctcagttcgggaaactggaaggacgaagggctcgtcatccgttcaacaagcgccgataactacaatgcaattgatccggagctgacaattgataaagatggaaacccttggcttgccttcggttctttttggagcggcattaagctgacaaagcttgataaaaatacaatgaaaccgacgggatcactttattccatcgctgccagaccgaataacggcggagctttggaagcgccggccatcacctaccagaacggctactattacttaatggtgtcgtttgataaatgctgttcaggcgtgaatagtacgtacaaaatcgcttatggaagatccaaaagcatcaccggcccatatctcgataaaagcgggaaaagcatgtcagaaggcggagggacgattcttgactccggcaatgaccgctggaaaggcccgggcggtcaagacattgtgaacgggaatattttagtgcgtcatgcgtatgatgccgaaaacagcggaattccgaagatgctcatcaatgatatcgattggagttcaggctggccttcctattaattgatcagccgggcatgtgtgtccggcttttttacttgcaataaaagattgacagtttgattcctccttaactataataaaattgttcgtacaaataaaaggataaaagttttgttgtttatattcgtacgtatattttttaaaaatgcaagcgctttattttgatgggaaggggaaatgaatgtgcttcagaacaaagaatatgaattttggtttgtaacgggaagccagcacttatacggagaggaaacgctgcagcttgtcgataaacacgcaaagggaatatgtgacggcctcagcggggtgtcatcaagatacaagatcaggcataaaccggttgtcacgtcatctgaaacgatcagagaggttttgcgggaagcgcagtatcaagaaaactgtgccggggtcgtgacatggatgcatacattttcccctgcgaaaatgtggattgaaggtctttccgcttttcaaaagccgatgcttcatcttcatacccagtatcatcgcgacatcccgtgggaaacgattgatatggactttatgaacagcaaccaatccgctcacggagaccgggaatacgggtatatccagtcaagaatggggcagacgagaaaagtcatcgcaggctattgggatgatgaggaagtcaaacatgacatttcgcaatggatgaacactgctgccgcctggaatgaaagcaggaatattaaagtagcccggttcggcgacaatatgcggaatgtggcggttactgacggagacaaagtcggcgcccacatccaattcggctggcaggttgacgggtacggaatcggcgatcttaccgaggtgatgaacaacgtcaccgacggagaaattgaggcgctttatgaggaatacgacaaattgtatgtcatcagcgacgaaacaaaacgggatgaagcaaaagttgcttccattaaagaacaggcgaaaattgaactcggattaacggcctttctcgaacggggcggatatacagcgttttcgacctcgtttgaagttttgcacggaatgaagcagcttccgggtcttgccgttcagcgtctcatggaaaaagggtacggatttgccggcgaaggcgattggaaaacggctgcccttgtgcgaatgatgaaaataatggcggacggagaacaaacctccttcatggaagattatacgtaccattttgaaccggggcgtgcgatgattctcggatcacatatgcttgaagtatgtccgacgatcgcccttgatcagccgaaaatcgaagtccatcctctctcaatcggagggaaggaagatccggcccggttggtctttaacggaatcggcggttcagccatcatcgccagcatcattgatatcggcgggcgattccgtctcattctgaatgaagcggaaggcagggagattgatcatgatatgccgaatcttcctgtggcgcgggtgctgtggaagccggagccatcgctgaaaacagctgcggaagcatggattttggcgggaggcgcccatcatacttgtatgtccttccggcttacggctgaacagatgcttgactgggctgagatggcaggcattgaaagcatctttatttcccgcaataccgaaatacatgagctgaaaaaagagttgaaatggaatgacgtattataccggctgggagggaattgatatggcgtatacgattggtgttgatttcggcacattgtccggccgggcggtgcttgtcaatgtccgcacgggcgaagaaatcgcgtctgcggtaaaagaatacactcatgccgtcatcgaccgcacgctgccgaagacgggtgaaaaactccctcgggactgggcgcttcagcatcctgccgattatatcgaagttctggaaacagcgattccgaacctgcttcaagaggcgggcactgatccaaaagacgtgatcggcataggaattgattttaccgcctgcacgattttgccgatagacgtcgcggggcagccgctttgtatgctgccggaatttgaacgggagccccacagttatgtgaagctgtggaagcatcatgcggctcaaaaacatgcagaccgtttgaacacgattgccgaagacacaaaagaaacattccttaaaagatacggcggtaaaatttcttctgaatggatgatcccgaaaatcatgcaaatcgcggaagaagcgccgcatatatacaaggcggcagatcggattgtggaagcggcagactggatcgtctatcaattgtgcggttcattgaagcgaagcaactgcacggccggctacaaagcaatctggaatgaggagacggggtatccgccggatcattttttcgaaaggctcaacccgttaatgaaaacgattacaaaggataaattaagcggcaccatttattcagttggggaaaaggcaggaggtttgaccgaaaaaatggcggagctgaccgggcttctgccggggacggccgttgccgtcgccaatgtcgacgcccacgtgtcagtgcccgcggtcggtattacagagccggggaaaatgctgatgattatgggaacctctacctgccatgtgctgctcggcgaggaagaacatatcgtccccggtatgtgcggggtcgtcaataacggcatcttgcccggatatgcgggatatgaagcgggacagtcctgtgtcggcgaccactttgaatggttcgtcaaaacgtgcgttccgagagactatgagaaggaagctgaggataaacacatagacattcacgagctgctcagcaaaaaagcagctgaacttgttccgggggaaagcggccttctcgcgcttgactggtggaacggaaaccggtcaaccttggtggacgccgatttgacgggcatgatgctcggcatgacgctgcacacgaagccggaagaaatctacagggcattggttgaagcgacggcgttcggaacgaggatgattatcgaaacgtttcgggaaaacggcgttccggtcgaggagctttacgcagccggaggaatcgccgaaaaaaatccgtttgtcatgcagatttatgcagacgtcacaaatatggacattcaattatccgggtctccgcaggcgcctgcactcggctccgcgattttcggagcgctcgccgcgggacgggaaaacgggggtttctccaatattgctgaagcatgtgcgcatatggggaaattaaaagacggcttttatgccccgaaccgggaaagagttgagatttatgacagcttatatgctgaatataaagagctcgtacactacttcggcaaagaaaacaatgtcatgaaacgcctgaaagccattaaaaaccgtgattttgcgaaaggggggagccgccatgcttgaagcgttaaaagaagaagtcctcgccgccaatctgaagcttgaggaacataaccttgtcacgtttacatgggggaatgtcagcggcattgacagagagagcgggagaatcgtcattaaaccgagcggtgtcgattacagtgagctgaccgctgacaaactggtcgtcctgaatgaggacggagacattctcgaaggctcgctgaaaccgtcttctgacacgccgacccatctttatctgtataaagcgtttccggctatcggcggaatcgttcatacgcactcccgctgggcgacgagctgggctcagtccggaagagacatacccgctctcggaacgactcacgcggattactttgaaagcgctataccctgcacgagggaaatgtatgaagaagaaattgtgaaagattacgaatatcatacaggcaaagtcatagccgaaacctttcaaaacgaaccgtatgaacaaaacccgggtgtcctcgtccacagccacggcccgttctgctggggaacggacgcgctgaatgccctgcataacgccgttgtgctcgaaacggtagcggaaatggcctaccattcgcttatgctgaacaaacagctcagtccgatcgacagagtgctgcatgataagcatttttacagaaaacacggggcgaatgcttattatggccaaacttgacgcagccgggtttctgattgatttagacggaaccgtattcagggggcgggagctgattgacggcgcaaaagaagccgttcatacccttcagtcactgggcaaagccgttgtctttttaagtaaccgcggcaatctatcaagagcaatgtgccgaaagaaactgctgggtgccggtatccgcacggatgaacggagcatcgtgctgtcctccagtgtgacggcatcatttttaaagaagcattatcctttgtcaaaggcgtgggtgttaggggaaaaagggctgactgatgaactcgctttagcgggtgtcgccctggcgcaaaacccgcaggcggcagactggcttgtcatctccctgcatgaaaccgtcacctatgaggatctgaatctcgcttttaaggcggcttcctccggcgcgcgcatcatcgccacgaaccgggaccgctcctttccgaatgaaggcggccatgccatggacgtcgcgggaatgatcggggccattgaagcatccgccggagcaaaaacggagcttgtcatcggcaaaccgtcttggctgatggctgaggcggcatgtgaagcgctcggacttccccctgaggaatgcgccattatcggagacagcctcgaatcagatatcgcaatgggcagcctgtacgggatgaaaagcgtattggttctgacggggtcggccaaacttggggagccccgtctatatgaacctgacgtcgtccttgattctattaaagacctgacagaattagcgaaggagggaatcctttcatgaaacgttctcctgaggacattcaatccgagtttgacaaggaaggggccagccgctcaccgattcaaatagaagatatcgtgatcggggcgaatgcaaaagaagagcttctcagatttctgcaaaaaaaatgctggaatcatccggtcatcgtctgtgaccggaacacgtacgaggcggcggggcgtctgcttgcggacgaattgagggcaggcgggatcaaagcgtcaaaagtcattattccggagcatgaagccggggccgccgcggctgatgagaggacattggtctatacgctgatcaacctcgcggaagagacggatgtcatcattgcgtccggttcaggaacgattcacgacattacgcggtttgccgcctgccagcgcggattgccgtttatctcattccctaccgctccatcagtcgacggttttacgtcggcgggagcgccgctcatattaaacggaatcaaaacgacgattcaaacgaaagcgccgatcgccttatttgcggatacgaatgtattaaaagaagcgccccgttcaatgacagccgcgggcttcggagacatgctcggaaaaataacatcgctggcagattgggagatttcccgcaggcttgcgggtgagccgtactcagaagccggggcgaagcttgtgaaagacgcgctttggcagtgcattgatcaccgcgctgacattgccatgggaacggaggccggcattcagatactgatggaagcgctgatcgtttcgggtcttgtcatgcttgcgcttgaccactcccgccccgcctcaggaggagaacatcacatctcgcattggattgagatggaaatgctgaaggcaaaacagcctccgattctccacggtgcgaaggtcggctgtgcgtgcgcggtgctgagtgatatttacaaagaactggcttgtcacgaagagcttgctgaactgccgccgcactttcgcgaggcgattcaatctgcatatgaagggcttcccgacggcaagacaattgccgggtggctcgcatctgcgggaggtcccgcctgtttcgatgagatcggtgtaaaacaggaccttgtcagcgatgcgcttaagcatgcgcacacactgagagaccgttataccggtttaaccatcataaatgaaaatgcagcgctctttgcacatcatttgcatcaatagccgcacggcctaaagtggaaggggtaatgacatgaaaaaaacgaccgctgtatgtttggtgctgatgatgctcttcttgtttaccgccggctgttcacaagaacggacggccggccggccgggagaaacagagctgacgttttggacatttaacggtctgcacgaacagttttatcaggaaatggtcaaagaatggaatcagaaatatccggatcgcaaaatcaagctgaataccgttgtttatccttatggacaaatgcatgataatttatcggtttcgctgatcgcgggtgaggggcttcccgatatagccgacgtggaattaagccggttctcgaactttctgaaggggaaggatatcccgcttgccgatctgacgccgctgattgaaaaagaccgcgataagtttgtggaagcgcgtctggccttatacagcaaaaacggaaaattgtacggccttgatacacatgtggggacgaccgtcatgttttacaacatggatatcatgaaaaaagcgggcgttgatcccgcctccattaagacatgggaagattaccggcgggcagggaaaaaagtgcgtgaggccgctgggaaaccgatgggaacggttgaaacaaacgactccgccacattcctatccatgatttcgcagcaagggtcaggctactacagcaaaaacggaaaattgattctgaacagcaagacgaatacagacacactgaattatgtaaaggacatggtaaatgataaaacccttctgccggctcccggcggcggccatcacagcgaagaatactacggttttatgaatcagggcggggcagcctcagtgctgatgcccatttggtacatgggacggtttatcgattatatgcctgatttaaaaggaaaaatggcgatttaccctatgccggcctggaaagaaggcggtgacagatcagcgggtttaggcggaacagccaccgtcgtgccgaagcaggctgaacatctgaagctcgcgaaagaatttctcggttttgcgaaaggttcgaaggaagggaatataaagctttggacggtgctcggctttgacccgctccgctgggacgtgtgggattcaaaagaattgaaggagaaaaacaagtacacggatttcttccggaacggtacgtcaattttttcctcgctccttgaaataaaagatgagatcaatccgatttatctgcatgaagacttctctaaagcggctgatctcgttgtcagacaagtgctgttcgatgcgctgaagacgcaggaaaaaacacctaaggaagccttggacgaggcggcagagcaattagagaaataggagaagccgccctatttaacagtgaaagcgggggagcttttatgagacctgtaaagacagagacagcgcaaaccgtttctgcagtccggaagaagccgcgccggcgcaatgtgctgtattcaaaaaaagcggcgccttatctttttacggcgccatttatcatttcgtttctcgttttctttttgtatccgattatcagcgtgtttatcatgagctttcaacggatactgccgggagaaattacatttgtcgggttttccaattataccgctcttcttaatccaaccttttatacggcattatttaacacattggaatataccttctggacgctgattgtgctgattccggtgccgcttcttttggcggtgattctgaattcgaagctcgtcaggttcagaaatgtgtttaaatcggctctgtttgtaccggctttaacatcgacgatcgtagcggggattattttccgtctgatgttcggagaaatgaatacgtcgcttgcaaacgagctgatgatgaagcttggcgtatcaccccaaaactggctcaacaacaaaggcaccggcatgtttttaatggtgctgcttgcgtcatggaggtggatggggattaacattctttactttctggcgggattgcaaaacgtgccgaaagaattgtatgaagcggctgaaattgacggggcgagtacgtggaaaaagttccggcatattacccttccatttttaaagccggtgtccgtttatgtgttaacgatcagtattatcggcggtttcagaatgtttgaggaaagctatgtgctttggcagaataattccccgggcaatatcggcctcacgcttgtcggttatttatatcagcaggggcttgcatacaacgaaatggggtacggggccgcaatcggaattgtccttttgcttgtcatcttactagtcagtcttgtttcactgaaactgtccggttcgtttaaaggggagggataagcgttgcgtaacaatcacatgtcttccgtgtacagagttgcgtttaccttgttttttatcatgctgagcctgttgtatatctttccgatgatctgtctattgctcggttctttaaagccgtcatctgagctgatgcgtatcgggctgaatctgcgtcttgatccggatgtgatgagccttgataactacacctatttgttcaacggggggagcatttatttcaaatggttttttaacagcctgctgctcggcgttctcaccacggttctcacgctgtttttttcctctttgatcggctacggacttggtgtctacgaatttaaaggcagaaatattattttcgttcttgtgctgatcattatgatggtgcctcttgaagtgatgatgctcccgttgttcaaattgacggtgggtcttcatttgatcgattcttatactggggtgattctgccgtttattgtgtcgcctgtcgccgtgttctttttccggcaatatgcgctcggacttccgaaggatctgcttgattcagcgagaatggacggctgcaccgaattcggcatttttttcagaattatggcgccgctcatgaaaccggcattcggggcaatgatcattcttcaatctttaaacagctggaataactttttatggccgctgatcgtgcttcggtcgaaagaaatgtttacgcttccaatcggactttcagggctgctgagtccgtacggcaacaactatgacatgctgatttccgggtccgtttttgcgatactgccggtgatcatcatattcttgtttttccaaaaatacttcatttccggactcacagtaggcggagtgaagggatagagagagggaggaaatataatgaaaaaagcggggattacagcagataaagaatatatcatcggtgaagtggacaaacggatgtacggatcatttatagaacatatgggccgggcggtgtatgaaggcatttatgagcccggacacccgaaagccgacaaggacggcttcagaacagacgtgcaggagttaatcaaggaattgcaagtgccgttcatccgctatccgggagggaattttctctcgggctacaattgggaagacggcgtcgggccggtgaaggaccgcccgcggaggctagatttggcatggcagacgacagaaacgaacgaagtagggacgaatgaatttttaacgtgggcgaaaaaagtgaacgccgaagtgaatatggcggtcaatctcgggacgagagggatcgatgccgcccggaacctcgtcgaatactgcaaccatcctgaagggtcgtactggagcgacttacgaaaatcgcacggatatgaaaaaccttacggcatcaaaacatggtgcttaggaaatgagatggacggcccttggcagatcggtcataaaacggcgcatgaatacggacggctcgccgctgaaacggcaaaggtgatgaaatggacggacccgacgatcgaattggtggcttgcggaagctcaaacagcggcatgccgtccttcatcgagtgggaggccgaggtgcttgagcatacgtacgagcatgtggattacatctcactgcatacgtattacggcaatcatgaaaatgatcttgagaactatttggcgaagtcgatggatttagaccattttattaaatccgtcacagccgtatgtgattatatgaaagcgaaaaaacgcagcaaaaaaacgattcacctttctttagatgaatggaatgtgtggtatcactcaaatgaagcggataaaaaagtggagccatggattacggcccggccgatcctcgaagacatctacaattttgaagatgcgctgttgatcggttcactgctgattacgatgctgcagcatgcggacagactgaagatcgcctgtctcgcccagcttgtcaacgtgattgcgcctatcatgactgaaaagggcggagaagcatggagacagccgatcttttatccttacatgcacgcctctgtctacgggagagggacttcaatgaagctgctgattacctccccgaaatacgactcagcggactttacggatgtgccgtatgttgatgccgcggccgtttaccatgaagaggatgaagcactgaccatttttgccgtcaacaaaagcaaggaactgatggaaacggagataaagctgagagggtttgaagattaccgcattattgagcatatcgtgctggagcatcaggatatgaaagcgaccaatcaaaaaaacagaaaagaagtcattccgcactccaacggaacgtcttcggcaaatgctgaagggataacggctcattttactccgctgtcctggaatgtcatccgtttatcaggaaaataatgttccgaaaagccgggctgcgctgccggcttttttttacgcaaaaatcatctcctgttatctgataattgtgataatatttagaaaaagagaaaaggggctgggattaaatgaatgcgattacaatcgtcatagcgtctatatgtattttggcgatcgcctatcggctttacggtacctttatgatggtcaaagtattaaaaatcaatgatcagacaccgactccggcccatgtgcttgaggatgggaaagattatgtgccgacgaataagtgggtgtcattcggccaccacttcgcggcaatcgccgctgccggcccgcttgtcggaccgattctggcagctcagttcggctatctgcccgggcttttatggctgttaatcggggcggtgatcggaggagccgtgcacgatattgtcgtattgtttgcatcaatgcggaaaaacgggaaaacgctttctgaagtcgccaaagaagagctcggcccggtggcgggtttttgcacgggtctctcgatgctgtttatcattacgatcacgatggcgggactgtccatggttgtgctgcacgcgcttgagaaaaacccgtggggaacgtttgcggtggggattacgattccgatcgcgatgggggtcggcctctactataaaaaaacgggcaatctcaaactcgcatcaactgtcgggtttcttttgttaatggccggtgttgtaatcgggccgcagctgcagacaacggctttcggggacatgctgacactggatgcgaaaacgcttgcagtggcgcttcctgtctatgcgtttttcgccgcggcgcttccggtttggcttttgctggctcctcgtgactatttaagcagttttatgaaaatcggggtttttgccgctttgatcgcaggcgtctttttcgtcaatcccgccattaaatttccggccgtaacggagtttattcacggcggagggccggtgatcgcgggtcctgtctggccgtttatttcaataacgattgcctgcggtgccatttcgggctttcatgcatttgtcggttccggcacaacgccgaaaatgctggataaatggagtgatataaagccggttgctttcggagcgatgcttgtggaatgtctcgtcggaattatggcgctcattgcagctgccgctcttgagcccgccgactattttgctattaacagcacgcctgaaatattccgcaccctcggaatgaatgtcgtccatctgcctgaattgagtaaagaaatcgggctcagtctggaaggaagaacaggcggcgctgttacgcttgccgtcggaatgacgtatatctttacggagattccgtttttcagtcatttggcttcatacttttttcaattcgtcattatgtttgaagcggtgtttattttaacggcgattgatgcgggaacccgtgtcgcccggtatttgattcaagagtttttcggagaggtctataagccgctgaaaaaaacagactggctgccgggctcgattttctcaagcgcgctcgcctgcctgctgtggggctatcttctgtattcgggcgacatcagctccatttgggcgctgttcggcgtatccaatcagcttatggcgtctgtcggcttaattatcggtgcgaccgtcgtattaaaaatagcggataagcggcgctatatgctgacatgcctgattcctctcgcttatttgtacgtgaccgtcaactatgcgggttattggatggtgcggtatgtgtatttgaaccccgaagcggcgggatacaacgtgctgaatggcgttttatccattatcatgctcattctcgggcttgtgattatcattgcggctgtgaaaaaatgggcgaatgtatggcgtgatccgagtgccagactggaagcttcaatacccggataaatccgcggccgtccgaacattgcagcatcataaaaaaagcagagagccgatcggtctctctgctttcatcttatgacaaatccgccgcttccaaaaggtaatccgccaaatgaaccgcgcggacacggccagttaatccttcgcgtaaaatgccgagctgcatttgcagaaggcatccgggattggctgtcacgatgacggccgcctccgtttttccggcggctttcatcttactgtctaatattttcatagacatctctgactctgttatattataaatccccgccgacccgcagcagctgtcggccttttccatttctctgtactcagcccctttaatgcttttcaaaagcgtgcgcggttcctctgacgtatgcatcacattgcggagatggcaggagtcctgatatgtgacgatatgaggagactgcgcccgcaggtttttttgatggaacttcagatcaaccagtacggatgaaaagtctttgagcttccggacgaattgttcggcacgttccgcccatccaggttcatctttcagtaaatgcggatattcctgaagaaaggcgccgcatccgccggcgtttgtaatgatataatcagcgtcaagcgcttcaaaagccgcgatattccgcttggccagttcttttcccatctctttttctccgctgtgcccgtgaagcgcgccgcagcacgcctggccgtccggaaccgcgatttcacacccggccgcctgtaaaagcgccgttgtcgcatgatttgtcgctaaaaacatcgtatccattaagcagcccgagaaaaaagcggcccgtttttggacgggacccgcggcaggaagaaaacgcggccgttccttcatgtctttccgtttcgggacgggcgggagcacttgttccattgtgcgcagatgttcaggcaaaacgcgcagcataccggtttttctgacggcggtctgcagtcccgatctttggtatattccgagaagattcacggctgtctgcatgcggttttggtgagggaaaagcccggtgaaggcggctttccgcaagaggcgcacgcccggcttatgttttttattttgatgaatgatatccctcgcttcttcaagcagctgtccgtaattgacccctgccggacaaacgggctcgcatgcccggcatccgagacacagcgaaagtgagcgctcgacatcttcatccggctcgatcagtccgtctgtgacggctttcatcagggcgatccggccgcgcggcgaatgggattcttgaaatcccgattcgatataggtcggacaggaaggaaggcagaagccgcagcgcatacagttcagcaattcaccttcatccatgcggtttttgaattctgtttgaatgtgttgctgctctttagccgttgtcatttcatcaccaccacgcgtttccttgatgaattggcgaatatttttcccggattcagcagattttggggatcaagcgcttgtttgatcgctttcatggcggtgatgccttctgttttcagcttcatttctaaatacggcgcttttacgatgccgaccccgtgttcacccgttatcgtcccgcccagctcaatcgctttttcaaaaatggcggcaaaagctttttcgacacgttccatttcctctgtatttcggatatcggtggtgcacgtcggatggaggttgccgtctccggcatggccgaatgtgcagatggacaggccgtatgtttctgcaatctcgttaatggctttgaccatgctcgcaatttgtgatctcggcacggtcgcatcttccagaatcgttgtcggtttcagccgggcaagggctgataatgcggaccgtctggcctctgtaagcgcgaatgcctcttcctcggtttcagccgtttggacggatacggcggctccgtttttacaaatcgcttcgattttttccatatctcgtctgaccgtgtcgatgtcaccgtcctgttcgatcagcagcaccgcttttgcgtcggtcggaagcccgatcttggcgtaatcttcaatgacctgcagtgtcggctgatccagaaattcgagtgtcgccggaatgattttttcagcgatgatggcagaaaccgattccgcagccgcttcaatatgttcatagagtgcaagcagcgtttttttcgtttccggcttcggaaccagctttaaagtcgcttccgtcacaacgccgagcgtcccttctgatccgacgaaaagccgggtcagatcataaccggcgacatcctttgtcagctttcctcctgtgcggatgatatcgcctgaagccaatacggcttcaaggccgaggacataatcccgggtgacgccgtacttcaaaccgcgcagcccgccggaattttcattaatattcccgccgatcgtcgatattttcatgctgctcggatcaggcggataaaataaacctttttgttcaaccgcacggatcatatcttgcgtaatcacgcccggctggacggttgccgtcaaattttcttcatcgatttctagaatgcggttcataagtttgaataaaagcacaagcccgccttcagacggacatgtgccgccgcataggtttgtgcctgaacccctcggcacgatcggaatgtcatgcctgctgcaaatcgttaatatacgggacacgtcatccgcgctgcggggggcgattaccgcatccggcatggcttgcagctgaggagccgcatcataagaatacacaagacggcccgccgccgaatcatcataattctccttcccgaccgtccggatgaacgcttcttttgcctctcgtgaaatcatgttctcccaacctccctgataagaaaagcgttttcatttaattgtaaagaaaaacgattccgcacactatggagaaacatatgaaaaatgatgatatgattacgtgctttttgtatgttgatctaaaaagcgcagcgccaaataaaaagccgttatgtcttcggggcggtcaagcttcatatttgtcagtgattccagtttggaaagacggtagcgcaatgtattgatatgaatatgcatgtcgtcggcggtgcgctttaacgataattgccgatcgaaaaaggcgcgcagcgtatccagaagttcttcccggccgagtacatgctcgaaaacccgccgtgaaaattccgacctcgtgccaggtgcgatatcggcaagacacatatccagttttaaatcttcttcaaagacggcctgcttgtcaccgattccggctgaaagtgctttatccgcctgttcgtatgattccgtgaggcgctctcccggaacgatccgtccgatgccggcggtgacaggctgcccgaaaacggcgccgatctttttaatgagctgtgttttggaagccgaatttgcttcatgattaatgagaatgcgttcatttccccagcggacaaacaggtcttcagggcattcgtactgccagagccgcccgagctcctccgctttatattgctcataacggccttgaatgagtatgatccggcggtatgcgtgaaggtctgcgccgatgagctttgctttttctaaaaagcccggagaccattctttcagctgcagccaatcaaccataaaggattcaagcattctcgcacgccactgcgcttcttccatatggcgcgtttctttaataaacagctccgtcatttttctgagcaattctccgaaaggcaggatatcgtcagggtctcctgtcagaccgaatactccgatcacttcatggcctgaaaaaacggggaggttcagtcctgcttttacgccctcgagccgtttttcatcttctttcgtaatgatgacattccgtttttcgcgcgcgcagatcagtgcgccttcatgaaaccatccggcgcgcgcctcgttggtgcccgcgatgatcattccttttgtatcggcaataatcacttcgcggctgtacatatgtttgacttcggcaatcaatttctttgccagttccggctgtaactgcatggcgatccccctcgccattattatacaaaaaaaaccgggtgtcccatcacccggttcatgtttattgcgcaggttttaatccgccttcaagtgttttgagcatttcatttttttctgagtccgacgcatgctgccaaagaacttcgaataagacgccgaggcccggaagcattttttcttcaccgctttggatggcgtcaacgatagtatgctccagctgatcctggttattgccggttacattggcaataacggcgttgcgtaaattaagatccattacaaccgctcctttttctgaatgtgatacgcatattcttaccgcgcacgcggtttattatgtgctgttcttaagatataataacaacatgcatgaaaaaaggagagcacagacataaagtgaaacgaatcgactctgcaaaaaaccaaaaagtgaaggactggaaaaaacttcacacaaaaaaagagagacttaaaacgaatacatttctgatagaaggagagcatctggcagaagaagcgctcaaatcaaagggaacggtaaaagaaattctcgtaaacgatgagagcgccatcccggccgatctggacatgagcatcccgtgctacgtgctgagcgaagacgcgttttcagccgtgacggaaacagaaacgccgcagcggattgccgcggtctgccatatgccggataagcggcctgatcagctgaaacggctgcttctgattgatgccgtgcaggacccggggaatttaggaacaatgatcagaacggcagatgcagcggggatcgacgccgttgtccttggtgagggaacagcagacccgtacaatggaaaaacgctgcgttcagcacaaggatctcattttcatattcccattttgaaacgtccgcttgatgagttcaccgctgagctaaaatcacaaggcgtcgcgatctacggcacggcgcttgaaaacggggcggcttatcaaagcgtgaagcctgaagaatcgttcgcgttaatcgtcgggaacgagggggcgggagtggacgcaggccttctgcaaaaaaccgatctcaacctgtacgttccgctgtacggacaggcggaatcgctgaatgtggcggtagcggccgccatcctcgtttatcatctcagaggataggttgcgaaaagccttggatttcactataatagatagcaataatgtaaaaaccgtgacagaggacgtcaatttttgcacacactgccttccagggagaaaatgccgctgactgagagcatttttatcgcagcacaaaaattgattttcacctctcgagttgtcaccgggaccgtgccaaacgcgcgtaaaggtgaaccggaacgatcgtttccgttatgtcaatgaagctgtcggcagatgaagtctgccttaaaaagggtggtaccgcggccacaactcgtcccttctctcaaggggcgggtttttttgttttctgaaaaaggcatagaacggtttggtttacataaaaggaggatgcatgatggaagagaagcttaaacagctcgaactggaagctgcagaaaaagtagaagcggcgggttcattaaaagaagttaacgacattcgggtgcaatatctcggaaaaaaagggccgattacagaagttctccgcggcatgggcaaactgtccgccgaagagcgcccgaaaatgggagcgctcgccaatgaagtgagagagcgcattgcagcagccattacggcgaaaaatgaacagcttgaacaagaagagatgaataaaaaactcagcagccagacgattgacgtcacattgccgggcagtcaggtaaacatcggcggacgccatccgctgacggtcgttattgaagaaattgaagatttatttatcggaatgggatataccgtcgaagaaggccctgaagtggaaacggattattacaactttgaggcgctgaacctgccgaaggaacatccggcccgcgacatgcaggacagcttttacattacagaagaaatgctgatgagaacgcagacgtcaccggtgcagacgcgcacgatggaaaagcataaaggaaaaggccccgtcaaaatcatttgtcccggtaaagtgtatcgccgcgacaacgatgacgcgacacattcccatcagttcatgcagattgagggtctcgtcgtcgaccgcaaaatcagcatgagcgacctgaaaggcacgcttgaattggtcgccaaaaaaatgttcggccaagatcgtgaaatcaggctccgtccgagctttttcccattcacagagccttctgtcgaggtggatgtgacctgctttaagtgcggcggacaaggctgctccgtctgcaaaaaaacaggctggatcgaaattctcggcgccggcatggttcacccgaacgtgctgaagatggccgggttcaatcctgaggaataccagggttttgctttcggaatgggtgtggaacgtatcgcgatgctgaaatacggcattgaagatatccgccatttctataccaatgatgtcagattcatttcgcagtttaaacaggcgtaagaggaggatacacatgtttgtttcttataaatggttagaagattacgttgacttgcagggaatcgacccggccgtgcttgcagaaaaaattacgagagccggtattgaagttgagggtatcgagtataaaggggagggcgtaaaaggcgttgtcatcggacacgtgcttgagcgcgaacagcacccgaatgccgacaaactcaacaaatgccttgttgatatcggtgcggaggaacccgtgcagattatctgcggcgcccctaatgttgataaaggacagaaggttgccgttgcaacggtcggatccgtgcttcccggcaatttcaaaattaaaaaagccaagctgcgcggcgaagcgtctcacggcatgatctgttcccttcaggagctcggcattgaaagcaagctcgtggcgaaagaatatgcggaaggcattttcgtttttccgaatgatgctgaaacgggagctgacgcaatggcggcccttcagcttgatgatgcgattttagaattgggcttaacgccgaaccgcgccgacgcgatgaacatgcttggcgtggcttatgaagttgcggctatcctcggcgcagaggtaaaacttccggaggcttcatatgaaaaagcggcagaaaaagcggcggatgctgtttccgttaaggttgaagatacgcaggccaatccgcattatgccgcaaaaatcattaaaaacgtcaaaatcggcccgtcaccgctttggatgcagacgaagctgatgaatgcaggcatccgcccgcataataacgtcgtggacattacaaacttcgtcctccttgagtacggacagccgcttcacgctttcgattacgaccggttcggttcaaaagaggtcgtcgtcagaaaagcggcggaaaatgaaaccatcgtgacgctggatgaacaagagcgcaagctgtcaagcagccatttggtcatcacaaacggaaaaaaagcgcaagccgttgcgggagtcatgggcggagctgagtctgaagtccgtgaagacaccactgcgattttactggaagccgcttatttcgacggacagaccgtccgcaaagcgtcgagagacctcgggctgagaagcgaagcgagcgccagatatgaaaaaggcattgatccggcacgcgttctgctggcggctgaacgggcctgcagtctcattcaggcatatgccggcggagaagtgctctcaggcacggttgaagaaaaccatctgaaaatcgaagcaaacaatattcacgtgtctgttgaaaaagtgaacgccgtgctcggcatgacaatcgctaaagaagaaatcatcagcatttacaagcgcctcgggtttgcagtcggtgaagctgaagacgttctcgtcgtaacggtcccgtcgcgccgcggagatattagaatagaagaagacctgattgaagaagcggcgagattgtacgggtatgacaatattccgtccacgcttccggaaacggccggcacgacaggcggcttgacaccgtaccaggcaaaacgccggaaagtgagacgtttccttgaaggagcgggtctttcacaagcgaccacttattcattaacgaatgataaaaaagcggccgcttttgcgatcgaaaaatcattcaacacgatgcttgctctgccgatgagcgaagaaagaagcattctcagacacagcctcgtgccgaatcttcttgaagccgtttcatacaatctggccagacagactgattccgttgctttatatgaaacgggttctgtatttctgacgaaagaagaaaacacaaaaccggttgaaaaagaacgggttgccggagctgtaaccggattgtggcgcaaaaatttatggcagggtgagaaaaagccggttgatttcttcgtcgccaaaggaatcgttgaaggcctgctgcatcaattgaatgtgtcagaccgggttgaatttgtccagtcagaacgcaaaaacatgcatcccggccggacggcaaacattctattgaacggttcgcttgccggatttatcggccaggtgcatccggcaatggaaaaagagctggatatcaaagaaacgtatgtgttcgagcttgatctgcacgcgcttctgaccgaggaaacagaacctgtcgtgtatacgccgattccgaagtacccgtccgtcacgcgcgacattgcgcttgtggcagataaaaccgttacaagcggacagctcgaagccgttatcaaagaagccggcggcgcgctgctgaaagaagtcaccgtatttgatgtgtacgaaggtgagcatatggaagaaggcaaaaaatccgtcgccttctcgctccaatatgttaaccctgaacaaacattgacagaagaagaagtgacaaaagtacatgaaaacgtgctgaaagcgctggaagaaacgtatcaggccgtattaagaggataaagaaaaagcttgcagatcactctgcaagcttttttactatgaccgcttccgttcaacaaggcgtttcgctttttgcgtattggcaaaatgaagtttggtgaacgttctgagcgcaccttctcccttattgatgatcagcttggcggcagcttcatcgacgtgcggccccgcgccttttggaatcgtcatcccagcctcacgcgaaagcttatccatttcaattaagaaagaatatcgcgcaatgatagaggctgcggcgacggaaagatgtatgctttccgctttcgtgctgaaaaacgttttttcttttacgatatcccgtccggaaagatgcttaaaataaatgccgggctctgcgaattggtcaatcagaatcgcttccggtttaacgccgttcatttttctcagcagattggaaatcgcctgattatgaaggagcgccttcatttttccttggctcatgcctttttcctgcatctgattgtatttttcgttttttaacacaagcaggctgtaaggaatggttttaattaacagtttggcgatttcaataatctgcggatcttttaaatccttcgaatccttcacaccgagttctctcattaaagagagctttgttttgtcggcgtaggcgcaggcaaccgttatcggcccgaagtaatcgcctgttccgacttcatcagagccgatcactgacatggaggcaatgcccgccgggggagcgtaaagcgggtcggccgcttttttgacggttttctttgctttcggcgtctcagccgttccccagcgggccgcttctgtgccggcgttttttccttgaaagagaaccttgcccgagcggtaggctgtaatggtacagcccggaggcttggcctggaagacggcgccctgcggaacggcgggagtaagggagccggcataggattgtttcatttgttccatagcggaagcggatacttttataacagaatgggacacgatataatctccttttttggcacttttcactgtatataccagtgtatcataacagcccgaggctcgtctttccattcaaacgataatcgtggtatgataggaactaggattctcgcggaatggaggagaaacgttgtctgacggcaaaaaaaccaaaacgacagtaaacatttacggccagcacttcaccattatcggggaagaaagcaaagcgcacatgcgtcatgtggccggagtggttgatgataaaatgagagaaatcaacgagaaaaatccatatcttgatataaataagctcgctgtattgactgcggtcaatgttgtgcatgattatatgaaactgcaagaaaaatatgaaatactggagcggcagcttaaagaaaaggaatgaacaccatatgatagatatcatcatcttagttctgctcttaatgggcacattgcttggattaaaaagaggatttatcctccaatttatatatttaacgagtttcatcctctcgattgcgtttgcggcgcttttttacaaaagcctggccccgcatctgagctttatacccgcgcctgatttttccggcgggcaggcggctctgtcttttattaaaggaaacgtagagacggcttattacaacgcgatcgcgtttgtcattttgtttatcatcgcaaagattctgctccggattatcggagcggcgcttaatatcatcgccggcattccggtcattaaacagatcaacaaactgctgggcggggtgcttgggtttctggaagtctatttatttgcgtttatcctgctatacgtcgcatccgtactgccggtaagcgcgcttcaggatatgctcgcacaatcgacgcttgcaaatatcatcacacatcatacgccgtatctgtcagggctcctgcaagaactgtgggcccagtacggggcataaaaaacttctcttgaccggagaagtttttttcaagctctgcgtcagttgtgccggaggagaaaaatttgtatgatgaaaagcaggaaacgactgggggttaacagtatgcataaaaaagatatcatcaggctgcttgaaacgattgcggtctatatggaactgaaaggggacaacccgtttaaaatatcagccttccgaaaagcggcagcggcgcttgagcaggatgaccgcagcctgtcggaaatcgacgacatgatgtctttatccggaatcggaaaaggcacctacggcgtcattcgtgaatatatgcaggaaggtgtgtccggcacgcttctccaattgcagaaagaagttccggaaggcttggttcctcttttgaagcttccgggcctcggcggcaaaaaaatcgccaagctgtatcaggagcttggcgttcatgacgcggaatcgctgaaagaagcatgcgagcagcaaaaagtacaggggctcgccggtttcggcaaaaaaacggaggagaaaatccttcaggctctcggagaagccggaaaacagccggaacgttttccgatcggctatgcgctcagcattgcttcagtaattgaagaaaatttggcccggctgacggatattcagaaatattcccgggccggcagtctcagaagagcgcgggaaaccgtaaaagatctggattacattatcgctacagatcatccggaggctgtcagagaacagcttctttctctcccgaacgtaaaagacgtgatagcgagcggggatacaaaagtatcagtcatcctgacctttgaatatgagacgagtgtggatttccggcttgtgacagaggaacagtttgccaccacacttcatcattttaccggttctaaagatcacaacattaaaatgcgccagctggcgaaagagcgcggcgaacggatcagtgaatacggagtagaaaccatagaaacgggagacgtcaaaacattcccgagcgaagaagcgttttacgcccacttcggtctgccgtttattcctcctgagctcagagaaagcgggcaggaggtcgacacgtaccgggaagaaacggatcttgtggagcataaagcgataaaaggcgatctccacatgcactcagcctggagtgacggcgctttttccatcagagaaatggcagaagcgtgtatggcaaaaggctatcagtacatggcgatcaccgaccattcccaatatttaaaggtagccaacggtttaacagccgaacggctcaaaaaacaggcggaagaaattgacgcgttaaatgctgaatttgaaaattttcatatttttaaaggcgtagaaatggacattctccccgacggttcacttgattatgatgacagtgttctgtcggaaatggatcttgtcatcgcatctattcattcaagcttcagccagccggagcatgtcattatgaaacggcttgaacaggcgctgacgaataagcacgtggacattatcgcccacccgacgggacgcctgatcggcagacgggccggctatgaagtcgacatcgacatgctgattgaactcgccgccaaaacaaatacggcgcttgaactgaatgcaaaccccgcgcgccttgatttacggactgagcatctgatcaaagcaaatgaaaaaggtgtgactttggtcattaataccgatgcccataatatcgagatgctcgatgatatgaaaacgggcgtgaccgctgcgcgcaaagggtggacggagacaaaacatgtgttaaacgcccggccgctacacgaggtcaaagcatttctgacgcgcaatgattaagtaaggaggatcacaaaaccgtgcagcaaaaagtgttatcatcacttgaatttcataaagtaaaagaacagattaccgcacatgccgcctcatcgctcggccgggagaagcttctgcagctgaaacctttgacggatctctcagacatccaaaaacagctggatgaagtcgaagaagcatccgcggtcatgcgcttgagaggccatgctccgttcggcggtctgaccgacataagatccgctttacggcgggcggaaatcggcagtgtgctgacgccggcggaattcaccgaattgtccgggctgctgtatgccgttaaacaaatgaagcattttatcagccaaatgacagaagacggcgtcggcattccgctgatacaggcccatgcagaagaactgattacattgggcgatttggaaagagagattaactcctgcattgatgaccatggtgaagtgcttgatcatgcgtctcccgctttaaggggaatccgcacgcagctcaggacacttgaatcaagagtcagagaccggcttgaatcgatgctgcgttcatcttccgcttctaaaatgctgtctgacaccatcgttacgattcggaatgaccgctttgtcatcccggtcaaacaggaatacagatcaagctacggcggaattgtccacgatacatcttcatccggtgcgacactgtttattgaaccgcaggcgatcgtagatatgaacaactcgcttcagcaggcgaaagtaaaagaaaaacaggaaatcgaacggattctccggatgctgacggagcatacggctgaacacacacaagaaatcgctcaaaatgtggaagtgctgcagacactggatttcattttcgccaaagcgagatacgcaaaagcgatgaaggcgacaaaaccactcatgaacggagacggttttatccggctgaaaaaagcgcgccatccgctgctgccccaagatcaagtcgtggccaacgatattgaactgggcggagattattcaacgatcgtcatcacgggaccgaatacgggcggtaaaaccgttacgttaaaaacactcgggctgctgacgataatggcgcaggcaggattgcacataccggctgatgagggatcggaagcagcagtatttgacaatgtgtttgccgatatcggcgatgaacagtcgatcgaacaaagtctgagtacgttctcatcccacatggtcaatatcgtcaatattttaaaagacgtgtctgaaaacagtcttgtgctgtttgatgaactcggtgccggaacagatccgcaggaaggagcggcgcttgccatgagcatccttgacgaagttcaccggacaaacgccagagtgcttgcgacaacccattatccggaactgaaagcatacggatataacagacaaggcgtcatgaatgccagcgttgaatttgacattgaaacgctttcgcctacctataagcttctgatcggagtgccgggccgaagcaacgcatttgaaatctcaagacgccttgggcttccggagcatatcatcggccaggcgaagtcagaaatgaccgccgaacataacgaagtcgatctgatgatcgcatcgcttgaaaaaagcaaaaaaagagcggatgaagagctttctgaaaccgaatcaatcagaaaagaagcagaaaaactgcacaaagagcttcagcagcaaatcattgagctgaacgcccaaaaagataaaatgatggaagaagcagaacagaaagctgcggaaaaactggaagccgccgcaaatgaagccgaacagattatccgcgaactccggtccatcaagcaagaacacagatcctttaaggaacacgagctgattgacgccaaaaaacgtctcggagacgcgatgccggcttttgaaaaatcaaagcagccggaaagaaaaacagagaaaaaacgcgagctcaagccgggcgacgaagtaaaggtgctcacattcggacaaaaaggggcgctgcttgaaaaaaccggcgagaaagaatggaacgtccaaatcggcatccttaaaatgaaggtgaaggaaaaagatcttgagtttctcaaatcggctcctgaaccgaaaaaagaaaaagcaatcaccgccgtaaaagggaaggattatcacgtatcccttgaacttgacctcaggggagagcgttacgaaaacgccctcagccgcgtcgaaaaatatttagatgacgcggtgcttgccggctatccgagagtgtccatcattcacggaaaaggcacgggcgccctccgaaaaggggtgcaggatcttctgaaaaaccaccgcagcgtgaaaagctcgcggttcggggaagcgggagaaggaggatcaggcgtaacgattgtcgaactaaaataaaaagggagtaaacgtcatgaatgctttttgggaaaatgagcttgttgaaatcgcggcttattacagtgtagccgtcttgtgtctcgtcatttttctgaccgtgtttgaattggtgacatcctataaaaactgggtggaaatccaaaaaggcaatcttgcggtggcaatggcgaccggagggaaaattctcggtatcgcaaatgtctttcagcacagcatcgcccagcataattcgcttttgcaaatgatcggctggggcgtatacggatttattatgcttttaatcagctattttatctttgaatttctgacgccccggtttaaaattgataaagaaattgaaaaagataacagagctgtcggctttatttcatttgtcatctcagtcggcctgtcatttgtggtggccgccgggatttaaggggacggggaaaaatggagaagcttgcgaaagtgctgctgtcggcagcgggaatttttctgttcatcggacttatttatctggtcatgacatcttaatactgaaaaaaggctgctgaactagaatcggcggccttttttattgagaataccagtttatgcaggccgtatcagagcaaatgacggcttcccaattcatggcgcggatgacagacggcatgtcttgatcttccatgagaaagagtgtcgtaaaagaatcatatatgctcataaaagcggcgcgccgtttttcgtcggcaatgatcatgtcagcccgcagcaatccgcatacatccgaagccgccgtttgattgagtgaaaatatgcctttctcttcgaccggctcataataagtgcagcgctttatgccttttgaacggaacacatccaaaagtcccggaattaaaaatggtgaagtgacatcatcgctcggcaagtacagatcgggatgaagccgattaaacagcctggcggattcaggaagtgcatattcctcccgcagtgccgtgacagcgctcataagcgcaagcgccgtctctttttcagaacgcaatccgcaaacggtcatgacggttttccaggaaacgggtctgcccatcgcgatgatctcctcatcactcggatatatatgttcataaggccgtttgcgcttttgctcttcccacccatcagacatcaggacaaagggatgaagcaaaaaggcggccgacgtaaacggcttaggcagctggcgcaggataggaactccctcttcaaaatgcagcgtttccagcaaactcaacacctcctgagactcgaaatttcacatgaaacgctttccaattccaatcacccttctgctataataatagtgtataggaaaacagaagggagaggtattatgcagtctgaaaagccatggctttctcaatatcccgaagagattccgcatgagcttgaatttactgatcaaaccctgccatctaatctgacaaactccgcagctcaattcccgaaccataccgccatttattttctcggaaaaaaactcacattccaagacgttctcacagattcgttaaagctggccgcttttttacgcaaaacaggcctgaaaaaaggtgacagagccgccattatgctgcccaattgtccgcagtcggtcatcgctttttacggcgtattgtttgccggcggcattgtcgttcaaaccaaccctctctacacggaacacgagcttgagtatcagctgaaagacagtgcgccgcgcgtgatcatcacccttgatatgctgttcccgaaggtgataaaaatgaaaacgttatcaatcgtcgaacgcattattacaacgagtataaaagattttttgccgtttccgaaaaatatgctgtatacactcacgcaaaaacaacaggttcatattgattatgacggatgcgaacaaattcacaaattagcggatattttaaaaaacgaaaaagcggaggaagcggagccatttgatattgaccctgcgcatgacatcgccgtgcttcaatacacgggcggaacaaccggctatccgaaaggcgtcatgctcacacatcggaacattcaggccaatacagaaatgtgcgccgcctggatgtacaaaatgaaaaagggagccgaaaaggtgctcggcatcgtgcctttttttcatgtgtacggattgaccgccgtgctcaatttttccattatgcagggatgtgaaatgatccttcttcctaaatttaatcctttggataccctgaaaacaatcgacaggctgaagccgacggtttttcccggggcgccgacgatttacatcgggctgttgcatcacccggagctgaataagtatgatttgtcctccattgaaagctgtccgagcggttcagcggcgctgccggttgaggtcaaacagaaatttgaaaaagtgaccggaggaaagcttgtggaaggctacggattatccgaagcatcaccggttacccattcaaacttcatttggggaaaaaataaacccggcagcatcggctgtccctggcccaataccgatgccggaatctattcagaagaaaaaggcgggcttgcggggccgtatgaacacggcgagctgatcgtaaaaggccctcaggtcatgaaaggatactggaataagcaggaggagacggcgcgtgtcatcagagacggctggctgtttaccggagatatgggatatatggatgaggaaggatttttctacatcgccgacaggaaaaaagacatcatcattgccggcggatacaacatttacccccgggaggtggaggaggcgctttatgagcatgaagccgttcaggaaatcgtcgtagcgggcgtccctgattcctacagaggggaaacggtgaaagcatttatcgttttgaaaaaaggcgccgaggccgatgccgatgagcttgatgcgtttgcaagagagcggcttgcgccgtacaaagtcccgaagctttacgaattcagaaaagagcttccgaaaacggccgtcggaaaaatattaagaaggcgtttagtcgaagaggaagatgcttcccgtgaaaaccaggtgccttaaaagaaaaacttgacaaaatccggattcctttttatcatgaagttatgaatgaatagtcattcatttatcgaaggaaggaacgatgacattgaaccaaaaacggccaaagtatatgcagattattgatgcagcagtagaagtcatagcggaaaacggctatcaccaatcacaggtgtccaaaatcgccaagcaggccggcgttgcggacggcaccatctatttatatttcaagaacaaagaggatatactcatttctctttttaaagaaaagatgggccagttcattgaacgcatggaagaagaagtgaaagaaaaaacgacggcaaaagaaaaactcgccctcgttattaagcagcatttcacactgctcggcaatgaccgccacctcgcgattgtgacccagcttgagctcagacagtcaaatatcaagctgcgcctgaaaatcaatgatattttaaaaggttatttaaacatgctggacaccattttgaccgaaggaatcaagtcgggggaatggaaagacaatctcgacgtccgcctcgcccggcagatgatattcgggacgatagatgagacagtgacaacatgggtgatgaacgatcaaaaatatgatcttccggatttgtcagacaaggtattggagctgttggtgtcaggaattcatcaaaactaaagggggttgacggatgaacagcctttcgatggcggtagaacaatctgttgcggtgatcaccattaatcatcagccggccaacgcgctgtccggtgcggttttagatgagttatccggtctgttcgaccggtgtgaaacagatgacagcgtcagaagcatcatcattcgcggtgaggggaaatttttctcggcgggcgccgatataaaggaatttacgtcgcttgaaaatcttgagcaatcttctgccatggcggataaaggccagcagctgatggaaagaattgaagggtttccgaagcccgtgatcgcagcgattcacggtgctgcgctcggaggcggtcttgagctagccatggcctgccatatcagaatcgctacattagatgcaaagctcggcctgcccgagctgaatctcggcattattccgggctttgccgggacgcagcggcttccccggtacgtcggtacggcgaaagcgcttgaaatgatcggcacttcagaacctgtgaccggagaagaagcgctcagcctcgggcttgtcacgataggcgccgaacatgaggaagagctgctgaaaaaggcgaaaacgctcgcgggcaagtttgcggaaaaaagcccgcagtcgatggcttatctgcttgagctcctttattcaaacaagatctattcttatgacggcggcttaaagcttgaagcaaagcgttttggggaagcattttcatcagatgacgcaaaagaaggcattcaggcatttctcgaaaaaagaaagcctcaattcggtgggcgaagataaaggggataagattatgaatctatttgtactgatgaaacggacgtttgacacagaagagaaaatcgtcattgaagcaggaaagattcaggaggacggggccgaatttatcattaatccatatgatgaatacgccattgaagaagccattcagctgaaggaagagcacggcggaaccgttaccgccgtaaccgtcggcggagaagatgcggagaaagaactgagaaccgcccttgcgatgggctgtgaccaggcggtgttaatcaatattgaagatgatctgagcgatcctgaccaatactccatttcaactatcttatatcattatttcaaggaccgggaatatgatctgattctcggcggaaatgtcgcgattgacggcggttcaggccaagtggctccaaggcttgccgaactgctgaacattccttgcgtcacaacgatcacaaaactgacaatcagcggcgatgaagctgtggcagagaaagacaatgaaggggataccgaaatcattaaaacctcacttcctttagtcatcacggcacagcaaggcttaaacgagccgcgctatccgtcgcttccgggcattatgaaggcgaagaaaaaaccgctggaagaacttgagctcgatgacctcgacattgatgaagatgatgccgcaccgaagcttaaaacgatcgaacgttttctgccgccgcaaaaagaagcgggcagactgatcgaaggagaagccgctgagcaggcgaaagagcttgtgtcactgctgagaaaagaagccaaagtcgtataaaccgatattaaagaaactgggggatgtcagaatgggaaaaaaagtgatcgtactcggagaaattcgtgacggcgccttacggaacgtcacctttgaagccatagccgcaggcaaaaccatttccggcggaggaaatgtcatcggcgtgctgatgggaaaaggcgcagctgatgcagcaccagaactcattcagtacggcgccgacaaagtatttacggccgattcgccggggctttctcagtatacggcggacggatatgccgcggttctcggggatctgatcgaaaatgaaaagcctgatgcggttattttcggccacacttctatgggaaaagatttgtcacctaagcttgcggcccggtttgaaacggggctgatttcagacagcacggatgtaagcgttaccggagacaacatcgtttttacaagaccgatctattccggcaaagcctttgaacaggtaatttcaaccgatccgttcattttggcgacgattcgtccgaataatattcaggcattagaaaaagacgcgagccggacgggtgatatcgaagagcttgcggcgcctccggcagatttgcggacggtcattgaagaagtagtcaaaaaaacggcggacggcgtggatttatcagaagcgaaaattatcgtagcaggcggccgcggtgtaaaaagcaaagatggatttgaaccgttaaaagaacttgccgaggtgctcggagcagcggtgggcgcttcacgcggcgcgtgtgacgcggactattgcgattattcccttcaaatcggccagacgggaaaagtcgtcacgccggatttgtatatcgcctgcggcatttccggagcgattcagcacttggcgggcatgtcaaatagtaaggtcattgttgccattaacaaagacccggaagcggaaatatttaaaatagcggactacggaattgtcggcgatttgttcgaagtggttccgcttctgacccaagaatttaaaaatgccaatattcattcataatcataaaccctctggcttatttgtcagagggttttaatttgtgttaattggttcgtacaaattaaaggttgataaaataagagattgacatgtacgaaccaatataataagcttttgtaaagcgcttacaaacttatccattcagcatacatcccagatacatagatcggctgtagtgctttcattcttattaagggaaaggaatgatcaagtttgtctcacaatacggcagtcattcaaactgatatcacacggggaaccattaataaaaacatatacggacatttcgcggaacacctgggaagaggcatatatgagggcatctgggtcggaaaagattccgatattccgaataccggcggggtcaggacggatgtcgccgccgccctcaaacagcttcagattcccgtcctcagatggccgggcggatgctttgcagatgaataccattgggcaaacggcgtagggaaacgcaaaaccatgctgaatacccattggggcgggacgattgattccaatgaattcggcacgcacgagtttatgatgctttgtgaactgctcggctgcgaaccgtacatcgccggaaacgtcggcagcggaacggttaaagaaatggctgattggattgaatacatgacgtttgaagcgggcacgccgatgtccgactggagaaaagaaaacgggcgggaaaaaccgtggaagctgacatatttcggaataggaaatgagaactggggctgcggcggaaacatgcatcctgagtattatgccgacctttacagaaactttcaaacctatgtccgcaattacagcggtaatgaaatctataaaattgccggcggcgcgaatgtcgatgattaccgctggactgaaactttaatgaaaaaagccgctgatctcatggacgggctgagccttcattattacacaataccgggcgatttctggaaggggaaaggatcagcgacggagtttacggaagatgaatggttcatcacgatgaaaaaagcggcgcatatggatgaattgatcacaaggcacagcgccatcatggatcagtacgatcccgaaaaaagagtcgggctgatcattgatgaatggggcacgtggcttgatcctgagccaggcacgaatccgggctttctgtatcagcagaatacgatccgcgacgcccttgtcgcagccacgcattttcacatttttcatcagcacgcagaccgcgtacagatgaccaatatcgcgcaaaccgtcaacgtgcttcaggcaatgatcctgacagaagggaaagacatgctgctgacgccgacgtatcatgtgtttgatatgtttaaggtgcatcaggacgcttctcttttggcgacagaaacaaaagcagccgggtacgaatggaatgacggccggctcccgcaagtcagcatttcagcgtccaaacagcaaaacggagacatacatatcagcctttgcaatatcgatcatctgcacaaagctgatgtgaagattgaactgcggggcatgaaaaagacagggaagccttcgggaacgattcttcacgcggaaaaaatgaatgcccacaatacattcagcagtccggaaaacgtcaaaccgaagccgttttccgggtttgctcaaaagggcggaaaacttgaggcggagcttcctccgatggcggttgtactaatcacgctgcctgcgaatccatcttaagttttgaacgcctgccgcccggttataatacactgtataaaaaagattatttccggcgggttcgggagaaaataatataagcattaaattagcatgaacgaatgggagatgctatactaaaaatcatcatttgactattggaggaataacaaatggctatcgtaaaagcaactgatcaatcgttctcagctgaaacaagtgaaggtgtcgtattggctgatttctgggctccttggtgcggaccttgtaaaatgatcgcgcccgttcttgaagagcttgatcaagaaatgggagacaaactgaaaatcgttaaaatcgacgtggatgaaaaccaagaaactgccggtaaatacggcgtcatgagcatcccgacacttctcgtattgaaagacggagaagtcgttgaaacatctgtcggtttcaaaccgaaagaagctcttgaagagcttgtaaacaaacatctgtaagccgaaagcttccgttacggcagggcgattcctttgaaagggaatcgccttttttgatcttccaaaagctgagaatggagaaaaacaaatgttcgtgatacactgaatggacacgagaaatgaatgtaaggaagggtaacgtatgaataaacaactgaaagaaaaactggccctccttcccgatcagccgggctgttatttaatgaaagaccgtcaaaaaacagtcatctacgtggggaaagcgaaagtcttgaaaaacagggtgcgatcttatttcaccggttctcacgacgcaaaaacccaacggcttgtgacggagattgaggactttgaatatatcgtgacttcctccaatcttgaagcgcttattttggaaatgaatctgattaaaaaatacgatccgaaatacaatgtcatgctgaaagatgataaaacctatccctttattaaaatcacccatgaacgccatccgcggctgattgtcacccggaatgtcaaaaaagacaaaggaagctatttcggcccgtatccgaatgtgcaggcggcgcgggaaacgaaaaaactgctggaccgcctttacccgctcaggaaatgctcaaagcttccggaccgcgtctgtctctattatcatctcggacaatgccttgccccatgtgtaaaggatatatctgaggagacaaaccgcgagattgttgaagacattacccgttttttaaagggagggcataacgaaatcaaaaaagagctcgaagcgaaaatggcagaagcggcggaaaagcttgaatttgaacgggctaaagaattccgcgaccagcttgctcacatcgaatcgacgatggagaagcaaaaaatgaccatgaatgaccttctggaccgcgatgtgtttgcatatgcctacgataaaggctggatgtgcgtccaagtctttttcatacgccaaggaaaactgatcgaacgtgacgtcagcatgtttccgatgtatcaggaagcggatgaagaatttctgaccttcatcggccagttctactctaaaaacaatcactttctgcctaaggaaattctggtgcctgacagcgttgacagggacatgatcaccgagctgttggaaaccgccgtgcatcagccgaaaaaaggcccgaaaaaagagctgcttttgcttgcgcacaaaaatgcgaaaatcgccctgcgggaaaaattttcgttaatcgagcgggatgaggaacggtcaatcggtgcagccgaacggctcggcgaagcgctgaatatttacacgccgcatcggattgaagcgtttgacaactccaatattcaaggcacaaaccccgtatcggccatgattgtctttattgacggaaaaccgaataaaaaggaataccgcaaatataaaattaaaaccgtaacagggcctgatgattacggctcaatgagggaagtcgtcagaagaagatacacgagggtgcttcgcgaaaatcttccgctgccggatttaatcatcattgacggcggaaaaggccagattaacgcggcgcgcgacgtgctcgagaatgagctcggtcttgatgtcccggtagcgggattggcgaaagatgataaacaccgaacatccaaccttttgatcggcgacccgcttgaaccggtgttgctggagcggaacagccaagagttttacctgcttcagcgtattcaggacgaagttcaccgttttgcgatcagctttcacagacagatccggggaaaaagcgcctttcaatccgttctggatgatatccccggaatcggcgaaaaacgcaaaaaaatgctcttaaaacatttcggatctgtcaaaaagatgaaggaagcaagccttgacgatatcaaaaaagcgggtgtgccggccgcggcggcccagctgctgtttgaaaaattaaaaaaatagtattgtgcttttctgaaaaatctgctagaatgtgaactaatttcataagatcgtgttatatggtgaagatagaggtgcgaacttcaatagtaagcctttggagaatgatggattctgcgaaaaaggctgaaaggggagcgtcgccgaagtgtatcacatcccatcggtgtgattcgctggccttgcattaaataaatgtaaggctgtcaagaattcattttcttggagggctatctcgttgttcataatcaatcgtaatgatatgaaaaagcaatgagagctattcctctcattgctttttttattgtggacaaaacgctcttttctcctcacccgcacgaaccaaaatgtaaagggtggtctagtatgggtcttatcgtacaaaaattcggaggcacttccgtcggctctgccgaaaaaattcaaaatgccgcaaatcgcgccattgctgaaaagcaaaaaggccatgacgtcgtagtcgtcgtttcggcaatgggaaaatcaaccgacgcgctcgttaacctcgcggctgaaatcacatctgaaccaagcagacgcgagatggatatgcttttgtctacgggagagcaggtcacgatttcgcttttggccatggcgcttcaggaaaaaggatatgacgccgtctcttatacgggctggcaggcgggtgtccgcacggaagccgttcacggcaatgcgagaattacggatattgatatcacggcgattcgttcgcagcttgcagaaggcaggattacagtcgttgccggttttcagggcgtaacggaagacggaggcatcacgacgctcggacggggcggttccgatacgacggcggtcgctcttgccgcagcgctggaagcggataaatgcgacatttatacagatgttccgggcgtatttacgacagatccgcggtatgtccggtcagcgagaaaactggcgggaatttcttatgatgaaatgctggagcttgcaaatctaggagcgggtgttcttcacccgcgggcggttgagttcgcgaaaaactaccaagtgcctttagaagtgcggtcaagtacggaacatgaagcgggaacattaattgaggaggaatcatcaatggagcagaatttaatcgtcagaggaattgcatttgaagaccagatcacgagggtgtccgttacgggcctgacaagcggactgactactctttcaacaatcttcaccgcgctggcaaaacgaaacatcaacgttgacattattattcagacacagtcggacgatggggaagcggatatttctttctcagtgaaaacggaagatgccgcgcaaacggtcgccgtgcttgaagaatataaaaacgcgcttgactatgaaaaaattgaaaccgaaagaaaactggcgaaagtctccattgtcgggtcgggcatggtttcaaatcccggcgtcgccgcggacatgtttgccgtactggcggaaaaaaatgtacaagtcaaaatggtaagcacatctgaaataaaagtatcagcggttgtcagcgaaaatgatatggtgaaagcggtcgaagcgcttcatgatgcgtttgagctttctaaacagccgtctgccgtataaacgggcaggcaaaaaggcgggacttggagtcaccgccttttttcaattatacagggtccttcatatcccattttacagtcaggacgactttatccgctctcttttttacctgttcataagattctgcaatctgatcgttcatcaattgaatctgttcggctataaaaccggcttcaagctggaaacaaggctctttctgatgtttgagcctgctggatacgagcggtccttccagttcaaattccagttcttgttttttcgatcctgcgtttgtcaaagttccccagccggctttttcaaaaaaggcggggatttcttcccacgattgaagaggaaatttgcgggcgaggcgttttcccgcccaatacatcatcgatgaatgctccgggccgaggatatccggaagcacgatttcccggattaattcgtagccgtatgcgctgacgtcgagttcagttaaaggttctaaagctgcttcataattattcttcatattatgtattcccctctctccttcgtttattatagcttaaacaggggggaggattacaggatgatcctataaaacacgcgaaaaaatgtgagaaagatatcgcaggaaaataaaattttccctccagataatcaattccgaaaattataatttatgtacacgttttcttgacgcccttttgagggaggagtaaaatgaaattgtcaataaattttaataaagtgcttacaattgaaacgaagtgggggcagagattttagtacatttcgcacttaaatcaaacagggggtaaagtaatgtctgggaacagagagttttattttcgaagattgcattccttgctcggtgttattccggtcggcatctttttgatccagcatttagtcgtcaaccaatttgccgcaaggggagcggatgcgtttaacaaggcggccggctttatggacagtctgccgttcaggtatgcgttagaaatttttattattttcttacctttaatttatcatgcggtttacggtgtgtacatagcatttactgcgaaaaacaacgctggccactacagttatttcagaaactggatgtttgtgcttcagcgtgtcactggtattctcacccttattttcgtcagctggcatgtatggcagacgcggattgccgcgcagatgggcgctgaagtcaacttcgatatgatggcgaatattctgagctcgccgtttatgctcggtttttacattgtaggcgttttatcggtcatttttcacttttcaaacggcttatggtcttttgcggtcacatgggggatcacggtcacgccgcgttctcaaagaatttcgacttacgtgacgctgattatatttttagcgctttcatacgtaggtttaaaagcgatttttgcgtttgtgtaagagaactagattactagagggagaggggctatcatgagtcaatcaagcattatcgtagtcggcgggggtcttgccggcctcatggcgacaattaaagcagcggaatcaggcacggccgttaaattgttttccatcgttccggtcaaacgctctcactcggtctgcgcgcagggcgggataaacggagctgtcaacacaaaaggggaaggagactctccgtttgagcattttgatgacacggtatacggtggcgactttttggcaaaccagcctcctgtaaaagcgatgtgtgaagcggcgccgtccattatccacttattggaccgcatgggggttatgtttaacagaacgccggaagggctcttggacttccgccgtttcgggggtacacagcatcacagaaccgcttacgcgggagcgacgacgggtcagcagcttctttacgcactggacgagcaggtgcgcagatatgaagtggcgggtctcgtcacaaaatatgaaggctgggaattcctcggtgccgttcttgacgatgagcgcacgtgccgcggtatcgtagcccaaaatctgaccaatatgcaaatcgagtcattccgttctgacgccgttattatggcgacgggaggtcccggaatcgtattcggcaaatcaacaaacagcatgatcaacacgggatctgccgcatcaatcgtttatcagcagggcgcttattatgcaaacggcgaatttatccaaattcacccgacagcaatcccgggggacgataaactgcgtctgatgagtgaatcggcgcgcggcgagggcggaagagtctggacgtataaagacggaaaaccttggtacttccttgaggaaaaatatccggcttacggaaacctcgtgccgcgggatattgcgacacgtgaaatctttgacgtgtgcgtgaatcaaaaactcggcatcaacggtgaaaacatggtgtatctcgatctgtcgcacaaagatccgaaagagcttgatgttaagcttggcggcattatcgaaatctatgaaaaattcatgggcgatgacccgcgcaagcttccgatgaaaattttccctgccgttcactattcaatgggcggactgtgggttgattatgatcagatgacaagcatccgcggactgttcgcagcgggtgaatgtgattattcaatgcacggaggaaaccgtttaggggcgaactctctgctttccgccatctacggaggaatggtggccggaccgaatgcggtgaaatatgtttccggacttgaaacatcagcggaagacctgtcttcttcattatttgattcctatgtgaaaaaagaagaagagaaatgggccgatattatgaagatggacggcgacgaaaatgcctacgtgcttcaccgtgagctcggagaatggatgacggccaacgtcacggtggtccgccacaacgacaagcttttgaaaacggatgacaaaatccaagagctgatggaacgctttaagaaaatcaatatcaacgatacgacaaaatggagcaaccaaggggcgatgttcacccgccagttctccaatatgcttcagcttgccagagttatcacgctcggcgcatataaccgaaatgaaagccggggagcgcactataaaccggatttccctgaaagaaatgacgatgagtggctcaaaacgacgatggcgaaacatgccggtccgtttgaagctccggaatttgaatatcaggatgtcgatgtatcactgattgcgccccgtaaacgcgactactcgaagaagaaggtggcgaaataatcatgagtgagaaaaagatacggtttatcattacacgtcaggatacgcccgaaagcgcgccatacgatgaagaattcgaaatcaattaccgcccgaatctgaacgtgatttccgccctgatggaaatccgcagaaatcccgtgaatgcaaaaggagagaaaaccactccggtcgcatgggacatgaactgtcttgaagaagtatgcggcgcctgctccatggtcatcaacgggagaccgcgccagtcatgtacggcgctgattgataagctggaacagccgatccgtctgaaaccgatgaaaacattcccggttgtccgtgaccttcaggttgaccgcagcagaatgtttgattcactgaaaaaagtgaaagcatgggtgccgattgacggaacttacgatttggggccggggccgagaatgccggaaaaacgccgccagtgggcatatgaattgtctaaatgcatgacatgcggcgtctgcctcgaagcctgcccgaacgtcaacagcaagtcgaaattcatggggcctgccccgatgtcgcaagtgcgtctgtttaacgcccatccgacgggcgcgatgaacaaagcagaacgtttagaagcgttaatgacagacggcggcctcggagattgcgggaattcacaaaactgtgttcaatcctgcccgaaaggcattccgcttacgacttcaatcgccgctttgaacagagataccaatttacaagcattccgtaatttcttcggaagcgacagggtataagaaagagaaaaagagcctcttccgcgcacgggagaggtttttttataaggagctgaaggtgatgaaacaaccgcattatattgatatcccgtttgaagaatggagacagtcgttttctttctttactgaagtatcggttcgtttttcagaaacggatatgttcggccatatgaataatgtaacccctttcatctattttgaagaagcacggatcgcttatttcaaacagcgaggcataacggcgcaaaactcggaaacgatgacggtcgtcgcaagccagcagtgcgactatatgcgtcaggtgatgccgtatgaaaatctgcggatttatgtgaaagcaagcgctgccggaaatgcgtccgtcacccttcattatcttggagaaaatgagtcgggtctgccgtgctttacaggttccgtcgttatggttcaagtgtcaaagaaaagcggcaaagcggtcagctggacggagcgggagaaaggcattctgctcgcctgaacggataactatttctctaagagacgtcacctccgaagcgccctttacatatgatatcttgactatataaacccattcgtttcagattcgctctcaccttagcaaggagggttacaatacttgaaggagaaagattttcaatcaaagccgctgctgaccaaaagagaaagagaagtattcgaattgctcgttcaagacaagacaacaaaggaaattgcaagcgagctatttatcagtgaaaaaactgtacggaatcacatttcaaatgccatgcagaagttaggtgtgaaagggcgttcgcaagctgttgtcgagcttcttagaatgggtgagctagagctctgattcttgccggttttccttcttttcgagaaggagccggttatttgcgttggcgcccgggctgatgggcatgcggttaaaatcccggtttttcctttttctctgtcagtcttgcattttcttaaaaaaagaaggaaaatagacacggagcgcatagcccagaaagatccttgagtgagggatggacaaatgacatcaaaatctgtagagcatgttgcggatatcgaaaaatcactccgccatatcgctgcgatcattaaacaaaaaggaagagaaatccttaaccaatatgcaattacaccgccgcaattcgtggggcttcaatggctttatgaattgggggatatgacaataggcgaattatcaggcaaaatgtatttggcttgcagcacgacgacggatctgatagaccgcatggaaaaaaataagcttgtcgagcgggtgaaagacccggctgacagacgggtcgtcagaattcatcttctcgctgaaggagagcgcattatccaagaagtgattttgaaaagacaggcttatttgcgggatatgtttgcgacattttccgaagaagaaacagccgctttcgaaaaatcattattgaaactgcagcatgaaatgaaaagaaaatgaggcgattttgttggaacagccgataggagtcattgattccggggttggcgggttaaccgttgctaaggaaatcatgagacagctaccgaaggaaaatatcatctatgtgggagatacaaaacgctgcccgtacggcccgcgtcctgaagaagaagttcttcaatacacgtgggaaatgaccgattacctgctggaaaaccaccatatcaaaatgctcgtgatcgcctgcaatacggccacggccattgccttggaggatattcagcgcaaaacggatattccggttgtcggcgtcattcagccgggtgcgagaacggcgataaaggtcacgaaaaaccagcatatcggcgtcatcggcacggtcaataccattaaaagcagagcatatgagcaggcgctgctcgggttaaacgcagaacttcaagttgagaacacggcttgtccgctgctcgtgccgtttgtggaaagcggacggtttcttcaggaatcagcggaggaagcggttgaagcatcgcttgagcctttaaaaggtacatcaattgacaccttgattttaggatgtacgcattatccgattttaaaagatccgattcagaactatatgggagagcatgtgaaaatcatttcctccggagacgagacggcgagagaagtgagcaccatcttgtcttataaaggtttgttaaaccaatcgaaacatgcaccggagcatcaatttcttacaacgggagagcggaacggcttcgcaaaaattgccgaagactggttcggccacgaaatcggccatgtcgagtgcatctcccttcaagagccggtcagaaaataaatcaaaaaacccgctgtttacggcgggtttttttgcgcttcccggtctatttcccggacagggctcgtatacatcatagtacaaacagccttaggagggaaaagtatgctgaaaaaaggacctgcagtcattgctgcaacatgtcttacttcggcttttgtgttatctggatgcggtttgtttcaatccgataaaacagccggggaaattgacccgcctcaagacatttcatatgtaaaggatgaagcgggaattcaggcaaaaccaaagcagtcagagaaaaacggcacttctaaagccgaccagccggccaatacagtcatgagagagctgtatctgattgataaaaacggctatgtcgcagcacagacactgcctcttccgaacagtgagggaaccgcaaagcaggcccttgagtatttggttcagggagggcctgtgtcagaaatcctgccgaacggcttcagagcggtgctccctgcggatacgacggtaaatgtcgatattaaaaaagacggcactgccgtcgctgatttttcgaaggaatttaaaaactataaaaaagaagacgaacaaaaaatcctgcaatcgattacatggacgcttacccaattcagctcaatagataaaatcaaaatcagaatcaacgggcacgaactgaaagaaatgcctgtgggcggtacgccgattacgggcgatttaagcagaaaagacgggattaatattgaaacggccggagtgaatgatctgacagacacccatccgctgactgtctattatctggcggaaacagagacaagcgaatactacgtgcctgtcacaaagcggattgacaattcggaaacaaatgacatcaccgccgccgttgaacagctcgccgacggaccgggcaaagcaagcgggcttttgacggactttaataacgatgttaagcttctcggcaagccgaaagtgaaagacggccaggttacactggactttaacagctccatttacggaagcgccgacgaaaaaacaaaaatggtatcatcgggcgtactggacagcatcgttctcacgttaaccgaacagccgtcaattaaaagtgtttctataaaagtaaacggaaaatcagaactggtgaatgaaaaaggagaatccctttcaaaacctgtttcgaggccgtcacaagtgaatacgggtagtttttaatttgcgatttttgatatactaataaaaaagaggttagcgttccggctgcctctttctttattcacaatccggaacaaaaggtttatgtacatataatcggaggtaaaatatgagacacgacggaagacagcacgatgagctgcgccctatcacatttgatttggattttatcactcacccggaaggctctgttttaattacagcgggaaatacgaaggtcatctgtaatgcatctgtggaagaccgggtgccgccatttttacgcggcggaggaaaaggctggatcacagcggaatacagcatgcttccccgcgcgacgaatcaaagaacgataagagaatcttcaaaaggaaaggtctccggcagaacgatggaaattcagcggctgatcgggcgcgcgctccgggccgtcgttgatttggagaagcttggcgaacggacgatctggatcgactgtgacgtcattcaagctgacggcggaacaagaacggcttccattaccggcgccttcttggcaatggccattgcgatcggcaaactcgtaaaaagcggcgttatcaaaacctctcctgtgacagattatctcgcggccatttctgtcgggatggataaagaagaaggccttcttttggatctgaattatgaagaggattcggcggctgaagtcgacatgaatatcatcatgacgggaagcggacgttttgtagagcttcaagggacgggcgaagaagccacattctcccgtgaagatttaaacggactgttaagccttgccgaaaaaggaatccagacgcttattcaaaagcaaaaagaagtgctgggagaaacattgcctgaagtgaaataagaaagagaggcctgatcaccgtgaaagaagccattattgcgacacacaatcagggaaaagtgaaagaattcaaggaaatactcgaaccgaaaggctacagcgtctcttctttggcggaaatcggatttacggaagaaattgaggaaaccggacatacctttgaagaaaacgccatcttaaaagcggaagccgtggcaaaagccgtaaacaaaatggtcattgcagacgactccggtttatcggtggacaaccttggaggcagaccgggcgtttattcagcccgttatgccggagaagcaaaagatgataaggcgaatatggacaaggtgctgtcagaattaaaaggcatcgaaaaagagcagcgtacggcccgtttccgctgcgcccttgccgtcagcatgccggggcaggaaacaaaaacggtcgaaggtcatgttgaagggtatattgcggaaggacccgagggggataacgggttcggctatgatcccatttttattgtaaaagataaagataaaaccatggcccagctgacaagcgctcagaaaaacaaaatcagccacagggctgaggcgctcaagaaactgtcaaagctgcttgattcataagggggagcgtatgcaatgaaagtgctgataataagtgacagtcacggccttgaagacgagctggagacgattgcaaagcggcacgaagacgaagcggatctgatgattcattgcggtgattcagagcttgacgctgcacatccggcgcttacgccgtttcacacggtaaaaggcaattgcgactttggcggcgggtttcaggatgaacttcttctggacgcaggttcaaagaaaattctggccgttcacgggcatcttcacggcattaaacagtcacttttaactgttttttaccgggcggaagagcttggggcggatgtcgtctgcttcggccattcacatattgccgggagtgaagagcttcggggcaagcttttgattaatccgggcagcatccgtcttccgagagtccgcaatgtgaaaagctatgccattcttactcttacagaaagagaaggcgccgtgacattttacgacgaaacgggtcgggaattgaaggactttgggaatacaatcagtttttaacaagtgatgggggagatttcattcttccccatcaaaagtttttaaaaaaatattgacttatgatttgaacctgtatataataaatcttgtcgctgatacataaagcaaaagctgtcccagtagctcagctggatagagcaacggccttctaagccgtcggtcgggagttcgaatctctcctgggacgtacaaaaaaaagagctggtgacatcagagtgaaaactgatgccgctggccttttttatcggatgactatattgtcaattcgctgatatcatggtaaaatgatcagcagaacaatttgattttcatgtcccagtagctcagccggatagagcaacggccttctaagccgtcggtcgggagttcgaatctctcctgggacgctaagaaatcgggtgtaaagcccgtcaaatcaacctcttatatcgtttagtgaaacggtcagtataacggtcacgtaagaaattacacctgttattggcttatatcactttcggtataggaggttttttgttgtgaccaaaagaaaatgaaaatgaagctgactatgtactaaaacgcaaggtaaatatcatgaaaaaggctgagaaacgtcacaagcaaaggcttcaggaatacaaggaacagaatattggatttgccactgaggaagaggaaatatttattagacttttctacacgcagcaagaacttgaagatatctttgctggctatgacttgggagttaagaggttacacttgcagaatctatatatggagcggatgcggcaattattcgatttatataacctaaaaggcacaaactttgtaggagtctcttaattgaggctcttctttttatcgatcaaatctgatgtcgtagctccgatatttaaacaataactaataaaacccgtcttttattcacttggttaaagaatgaacctaaactaaggagcagagtagaaaaaagagcgatacatattattcctaatttttgcatgattatagtataatagacacaaacaaccttttaggaaaacggtgataacaatgagtggcaacttttcattttttcaagggaaatgggatgtacttgctaacttgggagagacagctgagagaaatgtatatcatgacccccatacaacagtaatgaaactgcgattgttcgctgaaacactaactaaatttattcttgccgctgaaaatattaaagaggcatatggtacaacgcaagtggatcgcattaacactttgcgtcgggaaaggttacttgagcctgaattaattgatatattagaggctcttcgtcgcaaagggaatgtagcggtgcatgaagcggattatggaaaagtagaagaagcaaaggctttgttgcaattaacgttccgcttgtccatttggttcatggaggtatatggtgattgggattttcaagcaccagagtatacagaacttcaagaacaagtagaacagagtacagaaacacttcagcgagaatatgaggagaaagtcaaaaagcttgaagaagaattagaggcaattcgtcgacaggcggaagtggaacaagaagaggtaaaaatcgagcgtaaaaaaatatccaaaaactttatacgtcgacagcaattaactgaagccgaaacgcgtacgattattgatggaaaactacgtgctgttggatgggaagtagacacaactgtactaaatcatcaaaagaacggaacgctgccagagaaaaatcgaaacatggcaattgctgaatggaaggtcaatggcggcaggattgactatgcgttgtttattggcttaaagcttgttggctttattgaagctaaggcaaaaaagaaaacgattcctggcgcattagaaagtcaaacaaaagtgtatgcaaaaaatgtggtacaagtcgaagatgaagtcatcacacctacaacaggtgaatataaggtgccgttcttatacgcaacgaacggccgaccatacttgaaacaacttcaagaagagtcgggcatctggttttgggattcacgtaaaccgttagaacatgctcgcccattagaaggctggcattcacctgacgacttgcagcttcttcttagtcaagatgataaggatgcgaataaacggttagaagaagaggatattacgaagtttggtttgcgtcattatcagcaaagagcggtactttccgctgaagagggattaaaagaagggcaacgaagaatgcttattgcaatggcaactggaactgggaaaactcgtacagctatcgccctcatgtatcgcttaattaagtccaaaaaatgtcgtcgtattcttttccttgtagaccgtaattcgttaggaaaacagacagaggatgcacttaaggatacaaaaattgaaggctactcatttgctgatatatacgatgtgaaatctttagaagacatgtctccagaagttgaaacgaaggtgcaaattgcgacggtgcagggaatggttagaagacttttctatagcgataacgaaaagcttccaagtgtcgggcagtatgatttcatcattgtagatgaagcacatcgtggctatacaagtgacaaagaaatgtcagaggaagaattgaaattccgtgaccaaaatgattatattagccaatatcgacgtgtaattgattattttgatgcggcatgtttaggacttactgcaacaccagctcttcatacaacagagatttttggtatgcctatttttaagtattcttatagtgaagcggttctggatggctacttagttgaccatgaaccaccatatctgtttaagacagaactttcacaagtcggcattactcttgaaaaagacgaagaagttgaagtgtatgatgttgataaaggcgagattcaactagaaaaaatggaagataccattcattttgaggttgagcagtttaataaacgggtaattactgaaccttttaatcgggcggttctaaacaaactggttgaatacattgatccgacaggaaaagagaaaactcttatctttgcagccactgaccaacacgcagatttggttgttcggttattaaaggaagcctttaaagaacgtggcgatgaaattgaagatgatgctattatgaaaattactggctatatctataagccattagatgccattaaaaggtttaagaacgagcggctgccaaatgtcgttgtaacggttgatttactcaccacaggcattgacgttcctccaataacaaatctagtattcttacggcgtatacagtctcgtattctttatgaccaaatgcttggacgtgcaacccgtctttgtcccgacattggaaaaacacactttaacatttacgatgcagtgggcatctacgataaattgcaaagctatacggagatgaaacctgttgtaaagaaacaaaattacagtatcggtgaactatatgaatcacttgccaatgctactgcagaagatgaagcttcgttttatcgtaaccaattggcagcgaaaattcagcgtcgcaagcaaaggctgaatgaagaaggaaaacaaaagtttgaagaattgtcgaatggaaaaaatgtggatgagtgggcgaaagaaattcagttatatactccgcaagaagcaaaacagcacaacatgttatttgaatatatggaagcctatcgggtaaaaggcgagaaacgatatatctccaacaaagaggatgaagtaacagatgtggttcggggatatggtgaaggaaacaagagaccagaagattatttagaaggtttcgttcgttttatccaagaaaatattaatgaaattcccgctcttcatcttatttgcacacgaccgaaagatttaacaaggcaggatttacgagaacttattaccattctagaaacgaaaggctttaagcaatcgcatttgcagacagcttggaagcagacaaaaaatgaagacattgcagcagacattattagctttattcgccaagctgcattaggtgaagcgctagttgcccatgaagcacgtattaaacaggcgatgcaaaaagtgtattcactgcatgattggactccaagacagaagaaatggttagagagaatagaaaagcaattacttaaagtgcctgtattagcaccgactgcagaagaggcattctcggaagaaccttttagaacgtctggtggctacaaattactgaaacgtgagttcggtgaccatattgatcatattgtcaatacgatcaatgagaacctttatatcagctaacgactgtgcctcttcattgaggcacttttttgggttataatgaaaaggttcgctttcaactaaaaatcatcaaatttgatttaatagattagaagcttttcaggaggaaaaaagatgaataaccaagaaatcgttcaaaaattatggaatttatgcaatgtgcttcgtgatgatggcattacatatcaacaatatgtcacggagttaacctatattttatttttaaaaatgatgaaagaacagcaaacagaaaatgtaatacccgaaggatatagatgggatgatttgctagaaaaagaagggatagaactcaaaacattttatcaacaccttttaattaagctgggtaatagcgagaatgctcaattgcgtcagatttacacggatgctgctacaagtattacagaacccaagaatttagagaaaattctgaagagcattgatggccttgattggtacaacgcaaaagaagaaggtttaggtaatttatatgaaggcttgttagaaaaaaacgcaagcgaaacaaaatcaggtgctggtcaatactttacaccgcgtgtattaattgatgtaatggtacaacttattgaccctaaacctggagaaagatgcaatgaccctgctgctggtacatttggttttatgattgcggcagaccagtatttgaaaaataagacagataactattatgatttagatccacaactgggcgttttccaaaagaaagaagcgtttactggaatggaactcgtcacagggactcatcgtcttgctctaatgaatgcattacttcatgatatcgaagggcgactggaacaaggggattcgttatctagtaatggaaagtggatgaaaaactttgatgtcattttaaccaatccaccatttgggacgaaaaaaggtggagagagtgtctcccgtgatgacctgacgtttgcaacttccaataaacagcttaattttctacagttaatttataacgctttaaaagacgatggtcatgcacgggcagcagttgtattacctgataatgtcttgtttgaaagtggggttggtgcacagattcgacgtgatttaatgaataaatgcaatctgcatacaatcttacgcttaccaacggggattttctatgcccaaggtgtgaaaacaaacgctttatttttcacaagaggaacaacagaccaagataatacaaaggatgtatgggtatatgaccttcgcacaaatatgtcttcatttggaaaacgtaatcagttatcaatggctcattttgaaaacttcatgaaagcatatgtagcagaagaccgctcaaaagtggaagatgaacgatggaacaagtttacacgagaagaaattgcaaaaaaagatgatagtttagatattggattgattgcagatgaatcattatcttcatacaataatttgccagacccgattgagtcggcagaagaagcgattgcgaaacttcaacaagcaatggatctattaagtgaagtagtagaagaacttcgagcagtggaagaagatgaggtggtcgcaaagtgagtaagaagaaaaagaccattgaagagttgttagaagaagctttagtaccagaggaaaaacaactttatgaaattccggagaattgggtatggttgtctttgaagaattcaattaatagcattcaatacggttatacagagacttcctcacttcaagtaattggtccaaaatttttacgaattacagatattcagaacgataaagtagattggagtgccgtcccgtattgtaagattaccgagaaggaatttgaaaagtataagctagaagataatgatattgtagtagcacgtactggtgcaactacagggaaaagttatttaatcgataagccaccagtgtctgtttttgcttcctatctaattaggctaagatgtaatgatattatgtttccgagatttttatgggagtttatgaagagtcctgtgtattggaagcagataacggttgtgaagaaaggtagtgcacagcccggggctaatgcacagatattgggtaatctatctgtacctttaccacctttacaggaacaaaaacggattactgagaaagtagaagggcttttaggtaaaattgaagaagcaaagcagttgattgaggaagcgaaggaaacgtttgaacttcgtcgagcggctattttggaaaaagcatttagtggagagttattaacctcaagttttaacaaaattacaaagaaaattaatgaacaaataacattagaaattccaaatcattgggaagttaaaactttaagtgatgtagtggaaaattataataatcaaagaattcccgtttcacaaaaaaagagagaagaaatggagggagatatcccttattatggtgcaactggaatagtggattttgtagatggatatactcatgaaggtgagtttgtttgtattggggaagatggtgcgaatcttttatcccgttcaaagccacaagcttttgttattagagggaaatcatgggtgaacaatcatgcgcatgtagttaaaatgaatgataatatgtgtaataactatttaatgcattatataaattttattccattaaatgattatgttactggtacagcacaacccaagttgaacagaaaaaatttagataagataccaatagtattaccgcctgttaatgagcaattttcaatttcgcaaaagatagaggatttactttcaaaagaaatagaaatgatgaatgtttgtgattctaacttacatggaattgatattattaaacaatcaattatgaataaagcattccgaggtgaacttggaacaaatgacccaagtgaagaaaatacgatcgaactactaaaagaagtgctacaagagcaagtgaaatagttgtaagagggcatccaagttagttggatgtcttttacggttgcatacatgccaagttgggtattggtttgatacagaaccactctcattcacaaactggcaatcggtaaatttcagacacgacccacattatcaatatgatttagcatgataaagtaataagaattgcagtgaaaccctattcaagttcgataatgatatcgatagcagaggtgtagacttataagtgatatcaaagaaaagataccgctgcctctatcacattgttttcgataagctacctgtttcaaaaggtacaactttttgcgacgtattctgtgaaacggtagaataagggttcagatacaaaggcgttacgataagagtatcaaataacaaggtggatttaaccagtggacaacaaagaagttggatacgttagtgtaagcagcaaagaccaaaatgaagcacgacaactggatagtatgtatgctcttggaattgatgagcgtgatattcatatcgataacaaagcgggaaagacttcaatagacctcaataccaagctttgaaattgcgtttgcgtaatggagatacgttatacatacattcattagataggctaggtcgtaacaaagagatgattttaaacgagtggaaagatatcacacagaacatctaagcacatattgttgtagttgatatgccattgttggatacacggaaatacaatgaatccatcggttctttcgtggctgacttggtgctacaggtattatcatgggttgctgaagaagagagaacgaagattaagactcatcaagctgaagggatagctgcagctaaggcacagggcaaacaccttggaagacctaaaacaagacctaaaacaactattacaactgagtttgagcaggcttataaacaatggaaagcaggagaaattacagcggttgaagcaatgaagagatcaagtatgacaaaggctacattctatcgcagggttaaagaatatgaaacaagctaaaggattcctataacttctctctttctttaatataaagattatgtggggatgtttccacattttcactgggggcatgaaagggataaacctatagtcggctcatccacacaccatgaaaaaaataacttgtcgaaacgaatctaattctagtccatctcaaattacattattttaaatgatcaatccctatcccattctttgttgcagtctggacatttccatttaataatcctatcagcttctatactgcttataccaatttttcgtgtaaaatgggcagaaccatatactttctgcgattctttcggaataggttctccttgcaaatcagctttacaaaatggacaacattctttgttatctctcatgaaaccacgcctttaaataaatacctttacgttttaatatagcagatttaactgtattaccttttcaatagggttgttttctacaatatgaatgtttgaattgtacagcataagcaaatataatagaaattaagccaatcggtcaaagttcggaaagtgaccgttatacatgaacgtgaacgaatagcgatatatagagtagctcagccggatagagcaacggccttctaagccgtcggtcgggagttcgaatctctcctgggacgtataaaaacctcaagccttgacaatgggcttgaggtttttttgtattttatttttttgttttacgaaacaaaagttccgtatttgatgaaaattgtaaagtaattttaatataaatgaaacttaatgtaatatttatcgtaataaatatatgtataaagatacttaaggcgcccttgagtgataaattatctaatttctatcatgcattttgtcaatgaatgatagaaagacagcaggaggaattagcttttgaagtacgcatttgcatataaaaatcgcaatatagaaacgatcttttgcggaaaagacgagctgtttgaggaactgaagcaatttttaatcactcaatgcggtttaatcattgttgaggtttcaagggctgattactatacggagcaggaaatgaatcagtggaatgaccgttatactttgtgaatatgaaaagaaaccggccgtgggaggccggttttagtatcatctgaatccgctcggagcgctgaagcccccggcatggccgctgaaaccgcccccgagcgcgccgggatgcgccccggcgccgaggcttccgccgacgtcactgaaggattggccgtagtacccggttgtataagggtacggaacgaattgctgcccggcgaatgacagcgtgctttgcggggtctgctgtccgtatccggatgacgggaatccctgctgaaaagaagggccgccttgatatggtgctgtatgcatcggggccggaggataataagactgcggcggtaagaccggtaaaggcggaaatccaggaggcaggccctgcatgcctgataacatcttattcatgacatcactcatttcttacgagataagaacagtgtatgcgtatgtctgtataaagagcctgttcaatcgaacggaatatctgacaagcatgccggaaggacagagaaaaatcgtgtaataaaatgtgacatattcgtatatgaacggaaaaatttcatgtaatcttgagagattaataaaaaaatgataaaaacttttaatatttacagatccctttgtaccagtaatgaaagcgtatacaaagtagattgattaatctaaattgtctaataattataaaaatgctgttgacactgcctgcaaacgggcgtaatatgagttcaaacaaaaataaataaatgattcacgctaaaaagaaaaatcataaaacactgaaaaaacaaacaagtgaaggttcttttttaataaaagagctgccataataaaaagcgcagaagaggataagtagctttgctgaagtttttcacagagagccggtaacgctgagagccggtaaaacaaatcaaagtgaactcccctcagagtgccggtctgaaatgtaaagagtaggactcggccgagtgaacgcaatgtttactcgttatcaaaacggataatcattatccatgagacggtctgcatatgaccgtaaacaagggtggtaccgcggagagcaaagccttttcgccccttttggctatcgcatgaaatgcttggctgaatgtgggtgggaaggcttttttatttgcgtcagccggcgttgcgttttatgaattggattttagaagggaacattgaaaaggaggaactgaaaatgggcacaaatgtacaggcggattctttgtctgccgaatgtacaaaaacaatgaacggggctctgatgctgattgaatcattaaagaaagaaaatgtcgagatgatcttcggctatccggggggagccgtccttccgatttacgataaactgtatcaatcaggattggttcacatcctgccccgccacgagcaaggcgcgattcatgcggcagaagggtatgcgagagtctccggaaagccgggggttgtgattgctacctccggacccggagcgacaaatttagttaccggtcttgcggatgcgatgatagattcattgccgctcgtagtgtttaccggtcaggtggccacttcggtcatcggcagcgacgctttccaggaagccgacattttaggaattacgatgccgattacgaaacacagctaccaagtccgccgtccggaagatctcccccgtgtgattaaagaggcgttccatatcgccacgacgggaagaccgggtccggtattaattgatataccgaaggatgtcgcagcatttgaaggagagttcagatatgatcacgagatcagccttccgggttatcagcctgtaaaagagcctaactatctgcagatccgaaagctcgtggaagctgtcagcagtgcgaaaaagccggttattttagccggagcgggtgttttgcacggtaaagcttcagaagatttaaaaaattatgtcgaacagcagcaaattccggtagcgcacacgctcctcggtctgggcggtttcccggcagaccatcctctttttctgggaatggcggggatgcacggcacatacacagcgaatatggcgctttaccactgtgacttgttgatcagcatcggagcgcggttcgatgatcgcgtgaccggaaatctgaagcattttgcaaaatcggccaaagtggcgcatatcgatattgatcctgctgaaatcggaaaaattatcgaaacgcagattccggtggtcggcgacagtaaaatcgtccttcaggaattattgaagcaaaacggaaaacagggacagacagaggaatggaaacagcagctttcagaatggaaagaagaatatccgctttggtatacagacaacagagaagagggctttaaaccccaaaagctgattgagtatattcaccaattcacaaacggtgaggcgattgtggcgacggatgtcggccagcaccagatgtgggcggctcagttttatcctttccgaaaggctgataagtgggtgacctcggggggactcggcacaatgggcttcggccttccggcggctatcggagcgcagctggccgatcgtaacgccacggtcgttgccatcctcggagacggcggttttcagatgacccttcaggaattagatgtcatccggcagctgaatcttcctgtcaaagtggttatcttaaacaacgaatgtctgggcatggtcagacagtggcaggaaatcttctatgaagagcgctattctgaatccaaattctcggcgcagcctgactttgtcaaattgtcagaagcctacggcattaaaggcgtccggatttcatcggaggaagaggcggaagaagagcttaaaaaggcgctttcatcaaaagaaccggccgttattgacgtccgggtcgccaaaagcgagaaagtattcccgatgattgcgccgggtaaaggacttcatgaaatggtgggggtgaaaccttgaaacgcattatcacattaacggtggtcaaccgctcgggagtattaaaccggatcaccggcctgtttacaaaaagacactataatatcgaaagcatcactgtaggccacacggaaacaagcggtgtttcaagaattacatttgtcgtccatgtggaaggcgaaaatgacgtagagcagctgacaaagcagcttaacaaacaaattgacgtcctgaaagtgacggatattacaaaccaatcgattgtacagcgtgagctggcattaatcaaagttgtttccgcgccgtcggccagaacggaaatcaatggaatcattgagccgttcagagcttccgtcgttgatgtctcaagagacagcgtcgtcgttcaggttaccggcgaatctaataaaatcgaagcgctcatagagcttctcaaaccttacggcattaaagaaatcgcgagaacgggcacaacggcttttgcgaggggaacccagcagaaggcgtcatccaataaaacaatttcaattgtataacacaaaaaagggagagattaaaatggtaaaagtatattataacggtgatatcaaagagaacgtattggcaggtaaaaaagtagcgattatcggttacggttcacaaggtcacgcacatgcgctgaacttaaaagaaagcggaattgatgtcattgtcggcgtcagacaaggaaaatcatttacacaggcccaagaagacggtcataaagtcttttcggtaagagaagcggctgcccaggctgatatcattatggttcttcttccggatgaacagcagcaaaaagtatatgaagctgaaatcaaagatgaattgacggcgggcaagtcattggtattcgcacacggatttaacgtccatttccatcagatcgtgcctcctgctgatgtggatgtattccttgtcgcccctaaaggaccgggacaccttgtcagaagaacatatgaacaaggcgcgggcgtaccggcattgtttgccatctaccaggatgtatcaggcgaagcgaaagatacggctcttgcttatgcaaaaggaatcggcggagcgcgtgcgggcgttcttgaaacaacatttaaggaagaaacggaaacggatttgttcggtgagcaggctgttctgtgcggaggtttaacggcgcttgtcaaagcgggttttgaaacgctgacagaagccggctaccagcctgaactcgcatacttcgagtgtctgcacgaactgaagttgatcgtagacttgatgtatgaagaaggattggcgggcatgagatactctatctccgatacggctcaatggggagattttgtctcagggccgcgcgtagtcgatgcaaaggtaaaagaatcgatgaaacaagtattaacagatattcaaaacggtacattcgcgaaagaatggatcgtggaaaaccaagtgaaccgtcctcgcttcaatgcgatcaatgcaagtgaaaacgagcatcagattgaaaaggtcggcagacagcttcgtgaaatgatgccgtttgtcaaacaaggcaaaaagaaggaagcggtggtctccgttgcgcaaaattaatgttttcgacacgacccttcgtgacggtgaacaatcccccggggtcaacctcaattcccgggagaaactggcgatagccaagcagcttgaaagactcggggtggatattattgaagcgggatttcccgcttcatcccgaggtgattttttagccgtgcaggaaatcgcaagaacgattaaaaattgttcggtaacagggcttgcccgatctgtcaaaggtgacatcgacgcagcctgggaagcgctgaaagacggggccagcccgcggattcacatctttatcgccacctctgacattcatctgaagcataagctgaaaatgacgcgggaagaggttaaggaaaaagcggttgaaatggtgaagtatgcaaaagaacgctttccgatcgttcaatggtcagcagaagacgcatgccgcaccgaacttccgtttctggctgaaatcgttgaagaagtgattgatgccggcgcgagcgtcatcaacctgccggacactgtaggttacctgacgccggctgaatacggaaacatctttaaatatatgaaggaacacgttccgaatatcagccgggtaaagctatcagcccattgccacgatgatctcggaatggcggttgccaactcactttcggcaattgagaacggcgctgatcaaattgaatgcgccattaacggcataggagaaagagccgggaacgccgcgctagaggaaatcgccgttgcgcttcatgtcagaaatgacgcgcatcaagccgattcatctctcaatcttcatgaattgaagcggacgagtgatcttgtcagcaaactgacgggtatggcagttccccgcaacaaagcaatcgtcggagataacgctttcgcacatgagtccggcattcaccaagacggtttcctgaaagaaaaatcaacatatgaaatcatttcaccggaacttgtcggcgtgactgctgatgcacttgtactcggaaagcattccgggcgccacgcgttcaaagaccgcctgaatacgcttggattccagtttgatagtgatgaaatcaataaatattttacgatgtttaaagaactgaccgcaaagaaaaaagaaatcactgatgatgacttgatttctcttattttagaagaaaaagtgacagacaaaaaaatcggctatgaatttttgtctctgcaagtgcattacgggacgtctcaggtgccgactgcaacagtctctttaaaaaatcaggaaaacgaacagctgatgcaagaggcggcaacgggggcgggcagcgtagaagccgtttataatacgctcgggcgctgcatcgataaaaatattgaactgacagactaccgcatccaatccaaccggaaaggcgaagacgcgctggctcaagtttttgtcagagtgaccgtgaacggaaaagaaacatcagggcggggaatcgcgcaggatgttctggaagcttctgctaaagcttatctgaacgccgtgaaccggcaattggtgctggattgcaatatagacggattaaagagacagactgcggtcggctcgtaatagaaaggagaacgtttgatttgaaaaaacgcattgctttgcttcccggtgacggaatcggaccggaagtggcggaatcagcggcagatgtattgaaaagcgttgccgaacaattcggacatgaatttgaatttgaaaacggactgatcgggggagcggccattgacgcccatcaaaactcccttcctgaggagacggtggctctttgtgaaagatccgacgccatcctgctcggggcagtcggcgggccgaaatgggaccaaaatcctccggagctcagaccggaaaaaggcctgctcggcatcagaaaaaaactcggcctgtttgccaatctgcgtcccgtgaccgtatttgaaagcttgtctgaggcgtctccgctgaaaaaagaatatatcagcggcgtcgactttgtaatcgtcagggaactgacgggcggcctctactttggagaaccgagcagacagtatgtcaatgaagcgggagaaaaggaagcggtcgatacccttttttataagaaagaagaaatcgcacgcgttgtaagagaagcttttaagatggctgccggcagaaaaggaaaagtgacgtccgttgataaggcgaatgtgctttcttcaagcaggctttggcgggaaacagcggatgaaatcgcaaaagaatttcctgatgtgacgcttgaacatatgcttgtcgataatgccgcgatgcagctcatctacgctccgagccagtttgacgtcatcgtaactgagaatatgttcggcgatattttaagcgatgaagcctccatgctgacaggctcgctcggcatgctgccgtcagccagcttatcaagttcaggtcttcacttgtttgaacccgtgcatggatctgcgcctgacatcgccggtaaagggatggccaatccgtttgcggcgattttatcagcggcgatgcttttgagaacatctttcgggcttgaaaacgaagcgcaggcggtggaaaaagcggtcgcaaaggtgcttgcagatggcagccgtacacgtgatatcgcccgggacggccaatatgccggaacgcatgacattactgaaaaagtaaaagccgcattagccggctcgaatacaaaatctatagtgtgacgctttaaagaaagcggtcttagttcataggtagagggaggaaacaaagatgatgcctcgaacaatcatcgaaaagatttgggatcggcatgttgtaaaaagcggtgaaggaaaacccgaccttctctatattgatctgcacctcattcatgaggtgacgtctcctcaggcgtttgaagggttaaggcagaagggaagaaaggtcagacggccgcagaacacattcgcgacgatggaccacaatattccgaccgtcaaccgttttgacattaaagatgaagtcgcaaagcgccaagtaaccgcgcttgaacggaattgcgaggagttcggcgtccgtcttgcggatcttcacagcgcagaccaggggatcgttcatgtagtcgggcctgagcttggtctgacacttccgggaaaaacgatcgtttgcggagacagccatacatcgactcacggcgcattcggggcgcttgccttcggtatcggcacaagtgaggtggaacatgttctttccactcagacactatggcagcagcggccgaaaacgcttgaaatccgcgttgacggaacgctccaaaaaggagtgaccgcgaaggatgtcatcttgtcggtcatcggaaaatacggggtgaaattcggtaccggatatgtcattgaatacaccggggaagtattcagaaacatgtctatggacgaacgcatgacggtctgcaatatgtcaatagaagcaggagcacgggcgggactgatcgctccggatgacacgacgattgaatattgtaaaaaccgtaaatacgcgccaaaaggcgaggaatttgaaaaagccgccgcagaatggaaagcgttaaaaaccgatccgggcgccgtatacgatcattccatcgtgctagacggcagcgagatttctccaatggtaacatggggcgtcaatcccggcatggttcttccggtcgatgcccaaataccggcgccggaaacgattgattctgaagacggtaaaaaagaagccatccgcgcgtacgaatacatgggaatcgcaccgaatcaaaaaattgaagatattaaagtcgagcatgtgtttattggctcctgtacaaattcgcggatgactgatcttcgccaggctgcggatatgatcaaaggccgaaaagtcgctgacagcgtcagagccattgtggtcccgggttctcaaagcgtgaaacagcaggccgaagaagaagggctgcaccgcgtgtttctcgaggccggatttgaatggagagaatcaggctgcagcatgtgcctcagtatgaacaatgatgtcgtgcctgaaggggaacgatgcgcttccacttccaaccgcaacttcgaaggcagacagggaaaaggcgcgagaacacaccttgtcagtccggcgatggcggcaatggcagccattcacgggcatttcgtcgatgtaagaaagttttatcaagaaaaaacagttgtgtaaggagtgcgcgaaaagatggaacctttaaaaacgcatacgggaaaagcggccgtcttaaatcggatcaacgtcgatacggaccagattattccgaaacagtttttgaaaagaattgaaagaacaggatacggcagattcgcgttttttgattggagataccttgagaacggtgagcctgatcctgaatttgaattaaaccgcaaagtctatgaaggcgcgtccatattaattgccggagagaatttcggctgcggatcatcccgtgagcacgctccttgggcgctggatgattacggcttcaaaatcatcattgctccgtcatttgccgatatttttcatcaaaactgttttaaaaacggtatgcttcccatccgtatgccgtatgatcagtggaaaaaactcgccggtcaatatgaaaatcagtcccttaacatgacggttgatttggaaaaccagctcattcacgacagtgaaggcaaagagatttcatttgaagtcgatccgcactggaaggaaatgctgattaacggttatgatgaaatttcattaacgcttctgctggaggacgacattcagcagtttgaatcgaaaagaagttcttggcttcaagcctgaaaaaagccgaccggatctgtccggcggctttttttaccgtgcgcaccatcctttcttgtgtttcctgacgcgtgttgatacacttgaaaaaaatagcgcctgaaaggaaataaagtatgacgcatgacaagaaaaaagctgatatcattcctttcccccgtctgaaagaacgcttggttgataaagggatggccgccatgaaggataaacagtatcaggaggccctcgaactgttctcagaggcggtaagccacggcgataccgagtccgacgtacatttaggcatggcgatttgttttctggaactcggggaattggaagaagcaaaacaagtttgcgagaaaatgctgaatgaagggtacggccattatttcaccgtactgcaggtgtacatgaccattttaattcagctgaaacaatatgaagaagtcaaaagcacaattgaagctgtgctggaagaaaaccagctgcccgcagaaagtgcggagcaattctaccggctgctcgaattcagccgcaaaatgaccgatcctgaccagcaggatgaagcgtgggaggaggaatacgaggacattcttgatgcggaaaaagtgctgaacagccccgctgaacaaatgaatctcattcattctctcaaagaccgcaatattgcaaaatacacgggtctcttaaaaacaattcttcaagatccgggcgcgcatcctcttatcaagacgatgattttgacgctgatggcggagcatgactacagcaagccggtccatattacaaaattcggcgattcaatgatcgcggttccgagtgaaacggttcagcctgatgcggctccgattttgcatcgcgttctccgggtgcttgatgaaacgctcggcaatgaaaaccctacattatacgctgccgtcgaggagctgtggagaaggcatctgtacgtcctgcacccttttatgccgaagtttttgaacgcagatttatgggcggcggcgcttcataaggtcggttacgagatgcacggcattgacattgagccggaggaacttcatatgatgtacgagtttgacagccgcgaactcgaagaagcctgcacgatgattaaggatattgaagaaatttcttatttgtaaatcacgccatatagttgaaagcggtaggcgttatgttataatatagtggttgtatttatgtatagcggtttaactgaaatgagaattacggttggacaggctgccagttcattacataatgattctgattcaaagcggttttttctttgacaaagccgcggattgctttagaatggaagaccgacacaacctgaatagatttttggagggaaacacatgtctgtaaaatgggaaaaacaagaaggcaacgaaggcgtattaacggttgaagttgatgcggatacgttcaaaacagctcttgatgatgcatttaaaaaagtagtaaaacaggtttctattcctggattccgcaaagggaaagttccccgcggtttattcgaacagcgtttcggcgttgaagctctttaccaggatgctttagatattttacttcctgtagaataccctaaagcggttgaagaagccggcattgagcctgtagaccgccctgaaatcgatgttgaaaaaatcgaaaaaggcgaaagcttgattttcactgcaaaagtgactgtaaaaccggaagtgaaacttggcgattacaaaggcttaggaatcgaaaaagatgacactgccgttactgacgaagatgtacaaaacgaacttaaagctcttcaagagcgtcaggctgagcttgtcgtgaaagaagaaggcgctgttgaaaacggcgatacagtcgttcttgacttcgaaggtttcgttgacggcgaagcgtttgaaggcggaaaagctgagaactactcacttgaagtaggatcaggttcattcatcccgggcttcgaagagcagttaacaggccttgaagcaggcgctgaaaaggatgttgaagtaacattccctgaagagtaccacgctgaagagcttgccggaaaaccagctgttttcaaagtgaaaattcatgaaatcaaagcgaaagagcttcctgagcttaacgacgaattcgcaaaagacattgacgaagaagttgaaacgcttgctgaattaactgagaaaacaaaaaaacgccttgaagaagcaaaagaaaacgaagctgacgctaaattgcgtgaagagcttgttctgaaagcatctgaaaacgctgaagctgatgttcctcaagcgatgatcgacactgagcttgaccgcatgctgaaagaattcgaacagcgtctgcaaatgcaaggcatgaaccttgagctttacactcaattctcaggccaagacgaaaacgcgttaaaagagcaaatgaaagaagatgccgcaaaacgcgtaaaatcaaacctgactcttgaagcgatcgctcaagcagaaaaccttgaagtaacggacgaagaagttgaagctgagctgactaaaatggctgaagcttacaacatgccggttgaaaacattaagcaggcaatcggttcaactgacgcgatgaaagaagatttaaaagttcgaaaagcaattgattttcttgtagaaaaccgttaatatggttcataataatagacataataaaacagggcgcgattaattcgtgccttgttttgtacaattatgatataactctttttcttggggcaagatagtcattgccgggctgtttttcgtcatacatatagaatgtgcaagtgcgaaacacattgttaccgtcttactggaaagtatggtaaaatgcaatacatactcgatcgtagcaagaaccgttttcttttgcccttcaggtaaaagaaaaagtgagacaagattaaggggtgaaagaatgtttaaattcaacgaggaaaaaggacaattgaaatgctcgttctgcggaaaaacgcaagatcaggttcgtaagctggttgcaggaccgggtgtatatatatgcgacgaatgtattgagctctgtacagaaatcgtagaggaagagcttggtacagaagaagaagtcgaatttaaagacgttccgaagccgcaggaaatccgtgagattctgaatgaatatgtcatcggacaggatcaggcgaagaaatcacttgcggttgcggtatacaaccattacaaacgcatcaactccaacagtaaagtggatgatgtcgagctttctaaaagtaatatttctttaatcggaccgactggaagcgggaaaacacttcttgcccagacgcttgcgcgtattctgaacgtgccgtttgcgatcgcggacgctacatctctgactgaagccggatatgtcggtgaggacgtagaaaacatcctcctcaagctgattcaggcagcagactatgatgtggaaaaagcagaaaaaggtattatttatatcgatgaaatcgataaagtagcgcgaaaatctgaaaacccgtccattacacgtgacgtatcaggcgaaggcgttcagcaggcgctgctgaaaattcttgaaggaacggttgcaagcgtgccgcctcaaggaggacgcaaacatcctcatcaggaattcatccagatcgatacgacgaacatcctgttcatttgcggcggtgcatttgacggcatcgaacaaatcatcaaacgccgtctcggacaaaaagtcatcggcttcggctctgataataaagcggcagacctggaaaaagaagaactgctttctaaagttcttccggaagacttgctccgtttcggtctgattcctgaattcatcggccgtcttcctgtcattgcaagccttgagcagcttgacgaaacggcactggttgaaattctgactaaaccgaaaaacgcactcgtcaaacaatacaagaaaatgttagaacttgatgatgtcgagcttgaatttgaaggcgaggcattatctgaaattgcgaaaaaagcgatcgagcgtaaaacaggcgcacgcggcctgcgttctatcattgaaggcatcatgcttgacgtcatgtttgatctgccgtcccgcgatgatattgaaaaatgtgtcattaccggagcgacagtcgcagacggtgaagcgccgcgtcttgtattaaaagacggtactgttgtcggccaagataaaacatcagcataacacgacaaaacctcctgactcgaattaatcaggaggttttttttcttgtcctgacccttctgaaaatgtttattccgggctttgctgggagatactagcggacagaggaatgaattggatacataaatcgttttttcaggagggaccagcatgagttggacagggatcgcattatttgtacagctgtttttcgggatagtcatcggactatatttttggaatctgctcaaaaaccagcgaacacaaaaagtgacgatagataaagaatcaaaaaaggaaatggaacagctgcgcaaaatgcgcgccatcagtttaacagaacctttatcagaaaaggtgcggccgaaaagctttcaggacattgtcggccaggaagacggaattaaagcgttaaaagcagcgctttgcggaccgaacccgcagcacgtcattatttacggtcctccgggagtcggtaaaacggctgcggcgcggctggtattggaagaagcgaaaaagcataaacagtcaccgtttcaaaagcaggctgtttttgttgaacttgatgcgacgaccgcgcggtttgatgaacgggggattgccgatccgcttatcggttcagtgcatgatccgatttatcagggagcgggtgcgatgggccaggcaggcattccgcagccgaaacagggggctgtgacccatgctcacggcggggtattgtttattgatgaaatcggcgagcttcacccgattcagatgaataaaatgctgaaggtgcttgaagatcgaaaagtatttttagacagtgcgtattacagtgaagaaaatacgcaaataccgaatcacattcatgatatttttcaaaatgggcttccggcagatttccgtttgatcggagcgacaacgagaatgccgaatgaaattccgccggccatccgttcgcgctgtcttgaagtatttttccgcgagctggaaaaggatgaacttaaaatcgttgcgaaaaaagcagccgacaaaattcagaaagagatttctgacgaagctctcagtgtgctgaccacatatacgagaaacggacgtgaagccgtcaatatgatccagatcgccgccggcatggcggtgactgaggacagaaaagaaattacgacagaagatatagaatgggttgttcattccagtcagcttacacctaaaaatgagcagaaaatcgccgatgaaccgcaagtcggcatcgtgaacggacttgccgtctacgggccgaacagcggcgcattgctggaaatcgaagtgaatgtcacgcctgcgcaggacaaaggcaaaggaagcctgaatatcacgggaattgcagaggaagaaagcatcggcagccaatcgaagtcgatccgccgcaaaagcatggcgaagggatctgtggaaaatgttctgacggttctgcgcacaatgggcatcaaaccatcagactatgacattcacgtcaattttccgggcggaggcccgattgacggaccttcagcaggtatcgcaatggccgcggggattttttccgcgattcaccgcatcccgatcgaccatacggtggcgatgacgggagaaatcagcctgacggggcttgtcaaaccgatcggcggcgtcattccgaaaattaaagccgcaaaacaggccggagcaaaaacggtcattatcccatatgaaaatcagcagtccattctgaaacgaatagacggaatcaccattaaagcggtaaaaacgttccaggaagtgctggacgtcatattggttgaccctccttcagaacaaaaaccgtttgatatccaaatgaataaagaatccgtataaaccccatttttataatggggtttttttatggaggacatcttttcctttttcagaacagaaagaaagggtatactacgaagagactgttttatatacagggcaggcggataagccgattaaagcccgatcccggaattgtacaacgatgaaaaagttgtattataatggttcatactaaagtcacggaggtgtcagtcacatggcagaagatacaaaacgcagcatcccgctcctccctttaagaggcttattggtatacccgacaatggttttacatttagatgtaggccgtgacaagtcggttcaggctcttgaacaggcaatgatgcatgatcatatgatttttttagccactcagcaggatatttcgatagacgaaccgggtgaagaggatattttcgccgtcggcacttatacaaaaattaaacagatgctgaagctgcccaacggtacgatcagagtgcttgtagaaggaattcagcgggcgcagatccttgaatacaccgagctcgaagattatacttcggtcgatatacagctgatgcatgaggatgattcaaaagacgtggaagacgaagcgcttatgcggacgctgctggaccattttgaccagtacataaaaatttctaaaaaaatctccgcagaaacgtatgcggctgtgactgatattgaagagcccggcagaatggcggatatcgtcgcttctcatctcccgctgaaattaaaggacaagcaggacattttagaaacggcggatattaaagaacgtctgaataaggtcatccgttccattcataatgaaaaagaagtgctggagattgagaaaaaaatcggtcagcgcgtcaaacgttcgatggaacgcactcaaaaggaatactacttgcgtgaacagatgaaagccattcagaaggagcttggcgacaaagaagggaaaaccggcgaagttcagtcgctcacggaaaagatagaagaagcaggcatgcctgagcgtgtcaaagaaacggcgcttaaggaattaagccgttacgaaaaagtgccgtcaagctcagcggaaagctctgttatccgcaactatatcgactggctcatcgcccttccgtggtcggatgaaacagaagataaacttgatattaaaaaagccggggaaatcttagataaagagcaccacggcttagagaaagtgaaagagcggattttggagtatttggccgtgaaacagctgacgaaaacgctgaaagggccgattctttgtctggccggacctccgggagtcggtaaaacatctcttgcaaaatcaatcagtacgagcatggggcgccgttttgtgagaatttcactgggcggagtgcgcgatgagtctgaaatccgcgggcaccggcgtacatacgtcggagcgatgccgggccgtattatacaggggatgaaaaaagccggcaaacaaaatccggtttttctcctggatgagatcgacaaaatgtcgtctgatttcagaggcgatccgtcttcggcgatgcttgaggtgctggatccggaacaaaacagcacattcagcgaccactatattgaagagacgttcgatttatcgaaagtgctgtttatcgcgactgcgaataaccttgcttccatcccgggccctctcagagacagaatggagattatcagcctgtcaggctacactgaaaacgaaaagctggaaatcgtgaaggaccacctgcttccgaaacaaatcaaagagcacgggctcacaaagagcaacctgcagattcgggaccaggcgattacagacatcatccgctactacacgagggaagccggcgtgagaacgcttgaacgccagattgccgccatttgccgaaaggctgcaaaagccattgtgtctgaggagagaaaacgcattaccgttacagagaaaaatctggccgactatctcggaaaacggatattcagatacggacaggcggaaaccgaagatcaaatcggggttgtcacggggcttgcgtatacgacggtcggcggagatacgctgtcaatcgaagtgtcattgtcaccgggaaaaggaaagctgattctgaccgggaagcttggagatgtcatgcgggaatcagcgcaggccgctttcagttatgtccgctcgaaagcggaacagttcggaatcgatccgaaattccatgagaagtatgacattcatatccatgtccctgaaggagcggtgccgaaagacggcccttctgccggaattacgatggccacggcgctcgtttcagcattaacggaccgtgcggtaaaacgcgaagtcggtatgacgggagaaatcacgctgcggggccgcgtgcttccgatcggcggactgaaagaaaaggcgctcggcgcgcacagagcgggcctgaccactattattgcgcctaaagataacgaaaaagatatagaggatattccagaaagcgtcagagaaggactgaagtttatattcgtttctcacctggatgacgttttggaacatgccttagtaggagagaagaaatgaaagtcacaaagtcagaaatcgtgatcagcgcggtcaaacccgaacagtaccctaatggggggcttccggaaatcgcgctggcgggaagatcaaatgtaggaaagtcatcttttatcaattcattaatcaatcggaaaaacttggccagaacgtcatcaaaaccggggaaaacacagaccttaaacttttacatcatcaatgatgaattgcattttgtcgacgttcccgggtacggatttgcgaaagtttccaaaagcgagcgggaagcatggggaagaatgattgaaacctatatgacgacccgcgaagagctgaaagcctgcgtgcagattgtcgacctcaggcacgcgccgtctgctgaagacgtgaacatgtatgaattcctgaagtattacggcattcccgtcatcgttatcgcgacaaaagcggataagattccaaaaggaaaatgggacaagcacttaaaggttgtcaaacagacgcttgatatggatcctgaagatgagctgattttattttcctctgaaacgaaaaaaggcaaagatgaagcatggggagccattaaaaaaatgatcagccggtaatgaaaaacccaaaacgcagtgcgttttgggttttatcgtatagttttgttccgcttgataaacaataataaaaggctgatgccgatgaaaacatacggccagtatgttttgaagtgttccgtcggaatatggacggactccagccacgccgtaatttgtttaaagaagtataaaaagagggaaaaaccaatcatggcagccgcttcgtatacatattcttttctggctgccgcaaataaggagaatccgaagacgaagagaatcatttcaaaatctcccggccaccatgagagctcaggtttggcgaaaaagtgtaaacctatgccgaaaagaagcatgccgatcaggacgtgaggcccggccgcttcctttttgccctgatacaagagcacggcacccaaaagcataaggagcaccggccattccccctgattcgcaaacaggtgaacctgtccgctctgaagccatgcgaataatgaagcggcaagcagaagtcccggtaataaaattgatgtttttttcatcctgtcacctacccgcagtaaaggatttttagtatgatgattacagtggaaacgagctttttatactatagcataacatttttgaaatctgttcacattttcccgaagaaactatgttataattattataaataataaattctatgttagaatgattataaataaattgcgatgtacgggggtgcatgaaagcgatgcatattcttgttgtgggagtagattataaatccgcccctattgaaatacgcgaaaaaataagttttcagccggatgagcttgcagaagcgatgcttcgtttaaaagaagaaaaaagcgttcttgaaaacattatcgtgtcaacctgcaaccgcaccgaaatatatgcggtggtcgaccagcttcataccggccgttattatataaaaacatttttatccgaatggttctcgctgccgaaagaagagctgtctccgtttctgaaattttatgagagcgacgcggcgatcgagcatttattccgtgtggcatgcggcttggattccatggtcatcggagaaacgcaaatactcggccaggtccgctcaagctttaaaacggcgcaggcagaaaagacgatcggcaccattttcaatgagctgtttaaacaggcggtgaccgtcggcaaacgcacgcatgctgaaaccgatatcggcgccaatgccgtttccgtcagttacgccgccgttgaactcgcgaaaaaaatcttcggctcattgtcaaataagcacattttgattctcggtgcgggaaaaatgggcgagctcgccgcagaaaacctgcacggtcagggtatcggcaaagtaacggtcatcaacagaacgtttttgaaggcaaaagcgcttgctgaccgtttctccggagaagcgcgcagcttaaatcagcttgaacatgcacttgctgaagctgatattttaatcagttcgacaggcgcaagtgatttcgtcgtgtctaaagaaatgatggagagagcgggcagacagcggaaaggccgcccgttatttatggtggatatcgctgtgccgagggacctcgatccggcgctgaacgatcttgaaggtgtttttctgtatgatattgatgaccttgaaggaatcgttgaagccaacttacaagaacgccgtgaaaccgctgaaaaagtcgagctgtttattgaagcggcaattgttgagtttaagcagtggcttaatacgctcggcgtcgtgccggtcatttcggcgctgcgtgaaaaggcgctgtccatccagtccgatacgatgcagagcattgagcgcaagctgcctcatctgacggtaagagagaaaaaacttctcagcaaacatacgaaaagcatcattaaccaaatgctgcgcgacccgattctgaaagcgaaagagcttgcggctgaagcggattcagatgaaaagctgaagctgtttatgcagattttcgatattgaggaagaggccggccgccagctggacaaaagcctggataaccgccagacggttcattcgtttcaaaaggcagaagcaaaaacgggcttacgtccgcttgtaagtgagtgagggctgtatgattgatacagcaatggcaagacttaatgaagcgacaattgttatttatgcagtaagcgtccttttttactttatagattttcttcaacacaaccggaaggctgggaaaatggccttctggttgctttctattgtctggactctgcaaaccgtctatctttcttattttatgtggcagacgggcagatttccggtcttgaatattacggaggccctttacttttatgcgtgggtgcttgtcacgctctcacttgtggtcacgcagattctgcgggttgattttatcgtgtttttcacgaatgtcatcggtttctcgatgattgcgatccatacgttttcaccgacggatcagcattcggccgctttttccggccagctggtctcagagcttttggtcattcatattacaatggcgattctgtcttacggcgctttttccctttcttttgtcttttcgcttctttatcagtttcaatattctttattaaagaagaaaaaatggggaaaatggctgttgagaattgaagatttgtcaaaacttgattatatggcttacgttttaaatgtcatcggggttccgatgctgctgttgagcctgatattaggcgtgatctgggcgtatgtgtcgctggaaacgctgtactggtttgattcaaaagtgctcggctcgtttattgtgctgcttttatacagctactatttatatatcagattgattaaggaactgcagggaaaagtggcggcgttatggaattcagcatgttttctcgtgctgatgattaattacttcctgctcggaagcctgtcgcaattccattggttcagttaacgcacgcgcccaaacagattcgggaggaaagaaaatgagaacgattaaggtaggttccagacggagcaaactggctatgacccagacaaaatgggtgattaacaaactgaaggaattgaacccttcctataactttgaaatccgggagattgtcacaaaaggcgaccgcatccttgatgttacactgtcaaaagtgggcggcaaaggtttgtttgtcaaagagattgaacaggcgctgctgcatcaggagattgatatggcggttcacagcatgaaagacatgcccgccgttttgcctgagggtcttgtcataggctgcataccgaaacgtgaggatccgcgtgatgcgctgatttcaaaggggcatcaaaagctggacggcataaaagaagggggcatcatcggcaccagcagtttaagaagaagcgcccagattcttgctgaacgccctgatcttacaattaagtggatcagaggcaatatcgatacgagacttcaaaagcttgaaacggaagattacgatgctattattttagcggctgcgggactttcgagaatgggctggaaagatgatgtcgtatctgaatttctcgaaccggaccgctgtctgcctgcggtcggccaaggcgctcttgccattgaatgcagagagtcggatgaggagcttttgaagctgtttgcgcaatttaccgatgagtatacgcagcgcacggtggcagccgaacgggctttcttacacgcgatggaaggcggctgccaagtgccgatagccgggtatgcgtccgtcaatgaccgggatgaggttgaattggtcggtcttgtcgcgtctccggacggaaagacgatttataaagaaacagcggcgggacatgatccggaagaaatcgggaaacgctgtgcggcgatgatgtctgaaaaaggagccaaagcattaatcgacagcgtgaaacaggagctcgatcaggatggcaaatgaccttcctttacaaggaaagaccgtgcttgtcacccggaacaaaagacaggccgcaccgttccgaaaaaaagtggaggcgctcggcggaacggctgtttccgcttcgctgatcgcttttcaggaagcgctcccggatgaatgtgcggacagtctccgggaagacctttctgagccgggatggcttgtgtttacaagcgtaaacggtgtccggttctttttttcctatcttgatcggcacggtcttgcgctttcgggacggaaaaaaatcgcagccgtcggtgaaaagactgcgcgcgccctgaaagagcggggagcccggacggatgcgatgcctgacgagtatgtggcggaatgtctggctgatactttaaaacggcacgcatcagctgccgaacccatttcagtgataaagggcaatttatcacgcgatgtcataaaagcggagcttgagccgcttggctatcaaataagggaatgggtgttatacaataccattcaggatgaaaaaggcatggacgagctgagacgggctgcatcccgctctcattttgattttattacgtttaccagctcatcggcggtgcatacgtttatgcacgcggtcggagacggagaaaaagcgtgggaaaacagcggtgcgagctatatcagcatcggccctttgacagagaaagcgctcttggaatacgggatctcatcccatgtgcctgacatctatacgattgaaggcatgctggacgtcatgtgcagcatgtcgggaaaggattgataatgatgaatcaaacatttaacagacaccgccgtttgcgcgcgaacgctgagatgagagatttagtaaaagaaacacgtcttcacccttcagattttatttacccgttatttgtcgttgaaggacttgaaggaaaaaaagaagttccttccatgccgggggtttatcatgtatcactcgatttgttaaaggatgaaatggctgagctgatatcgctcggcattaagtcggtcatcgttttcggcgtgccggaagaaaaagacgcctgcggaacccaggcttttcacgatcacggcattgtgcagaaagggattgctgaaattaaaaagcattatcctgaaatgatcgtaatcgctgatacgtgtctctgtgaatacacggatcacggccattgcggcgtcgtgaaagacggagaaatcttaaatgacgagtcgcttgagctgctggcgcagacagccgtcagccaggccaaagcaggcgctgacatcatcgctccttcaaatatgatggacggttttgtcacagtgatcagagaagcgctcgacaaagaaggattcacgaatattccgatcatgtcttatgccgtgaaatattcaagtgaattttacggtccgttccgcgacgcggctgacagcacgccgcagttcggagaccgaaaaacatatcagatggatccggccaaccgcttggaagcgctccgtgaggctgaatcagacgcggcagaaggcgctgactttttaatcgtcaaaccgtctatgtcatacttagatattatgcgtgatgtgaaaaaccgccatcacctgccgctggtcgcatataatgtgagcggggagtattccatggtgaaagcggcagcccaaaacggctggattaaagaaaaagaaatggtgctggaaattttaacgagcatgaaacgtgcaggagccgatctgattatgacgtatcatgcaaaagacgcagcaaaatggcttgctgagtaacgatttcatttgacgggagctgaggcagatgagaagctatgaaaaatcaaaagccgcttttaaagaagcgcagaaactgatgccgggcggagtgaacagcccggtgcgcgcgtttaaatcagttgatatggacccgatctttatgcagcgcggaaaaggatcgaaaatttttgatattgacggcaatgaatatatcgactacgtcctgagctgggggccgctcattttgggccacacgaacgaccgggtcgttgaaagcctgaaaaaagtagccgagaacgggacaagtttcggagcatctactgaggtggaaaacgaactggccaaattggtcattgaccgtgtgccgtctgttgaaatcgtgcggatggtcagctccggcacagaggcgacaatgagcgccctgcgtctggcaagaggatataccggccgaaacaaaattttgaaattcgaaggctgttaccacggccatggtgattcactgctgatcaaagcgggatccggagtggcgacactcggccttccggacagcccgggcgtgccggaaggaatagcaatgaatacgattaccgttccatacaacgacttggaaagcgttgcactcgcattccgggagtacggtgaagatattgccggggtcattgttgaaccggtagcaggcaatatgggcgttgttccgccgcaggaaggctttttacaaggacttcgcgacatgacggaacagtatggcgcgctgctcatttttgatgaggtcatgaccggttttcgcgtggattataactgtgcgcaagggtatttcggcgtgacgcctgacttaacgtgtctcggcaaagtcataggcggcggtcttcctgtcggtgcgtatggcggaaaagctgacattatggaacgaatcgcgccgagcggtccgatctatcaggctggaacattgtcaggaaatccgcttgccatgacagcgggacttgagacgttacagcagctcacacctgaatcttaccaagaatttgtgaaaaaaggcgatatgcttgaagaaggcatttcaaaagcagctgcagcacatggcattccgcacacgtttaaccgggcgggttcaatgatcggcttctttttcacaaatgagcctgtcattaactatgaagcagccaaatcttctgatttaaagctgttcgccaagtattataaagggatggccgacgcaggcgtatttctgccgccgtctcaatttgaaggattgtttctctccactgcgcatacaatggaggatattgaaaataccattcaagccgctgagaaagtgttccaggcgatcagccgctgataccgaaaagccgatgcaagcaagacttgtatcggcttttttcaatgcctccattatcatatttttccggattgcggcatacacctttagtgacatctaattgtatggattagatgaaaggaggatatgaacttgccgcataatcaccgattgcaattttctgttgaagaatcaatctgtttccaaaaaggacaggaagtttctgaattactttcgatttcattagaccctgacatcagggtgcaggaagtaaatgattatgtctcaattaaaggatcattagaacttactggcgagtacaacatagatcacagcagtcattttgaagagcttaatagggagatgaggcatgtagaggaagtgagggcgagggaggatggcacggccgagctcattcattgtttcccggtggatattacgattccgaaaaataaagtgagccacctcaatgatgttttcgtatttatcgatgcctttgattatcagctgacggattcaaggatcttaaccattcaggctgatttggcaattgaagggctgcttgaggaatccgagccaaaagagccggagatccctttgtacgtggctcctgaatttgccagagaagaaatgatcaatcttgccggacatcatttggaggacgaaaacgaaccagaattaatgatacgccatgagcctgaaatacctttgagtgtatcaaaagaagcagcacaagaaaccgagaagaacgaggaagaaaccccgcctttactcaggcaggaggaagaagagcagggagctgccccgattctgagagagcaggaagaagaagagcaggaagcagccccgattctgagggagcgggaagaagaagagcaggaagcagccccgattctgagagagcaggaagaagaagagcaggaagcagccccgattctgagagagcaggaagaagaagagcaggaagcagccccgattttgagggagcaggaagaagaagaacaggaagcagccccgattttgagggagcaggaagaagaagaacaggaagcagccccgcttctgagggagcgggaagaagaaaagcaggaaacagccccgattctgagggagcaggaagaagagcaggaagcagctccgattctgagggagcaagaagaagagccggaagcagccccgattttgagggagcaagaagaagaagagcaggaagcagccccgattctgagggagcaggaagaggtgccgaaacctgtttcctttactgagcctcctcctcccgtttccttccaacacgaagaagagcaggaagaagctgaggagcctgcaatcatgtcggctgtgaggaatgaacctgtatttgacgatgattcagcagaagtgcaggaagagccaaaagatgataacgagccggttttccctgcgttcactctgactccgcatgcagaaaaaccaaaaattgcggaacagcccttccttcaaaaagaaaaacagccagaggccgagccgcttctccgtcagagcgatcatgaggcggcagaagacgaagatgagcctgcggtttttcaagaagagcaggcgcccgtttatcgcgagttcgttccggaacggcaggaagaggagttttacagcgctcctaagctgcttgaagaagagtctcaggatgaagtagggttcgaaattgaggtaaggaagatggcgccgccggaggaggaaaccgggaagcctctcgatttgtcttttcagttttccaaactgccgcctgaggagccggcgcaagctgaaccgcctgagccgcttaagtctgaaagaaagaatgaagaagcggcaccgggaaccgagcagaaggaaaatgacaactctcattacttgacaaaattatttacaagggaagaagaaaagttttcaagaatgaaaatttgtatcgtacagcagcaagatactatcgaccgggtgtgtgaacgatatgacataacatcccagcagctcatcagaacgaatgctttatcgtttgatgacgagcttgaagaaggtcagcttctgtatatacctgaatataataacagccatgcgtaagcacaaagaggccgtaaaaatgtggtgaatggaatggaagcagtccaatcagtgcttcaggaatacgggctggcggctgagtatattgagcctgtcagcccgcatgtttggaaggtctactcaaactacggcatttttgctttgaaacagctcaagccggcccgcagcagtgaatttacggatcttatgattgagattgaggagaaaggctaccgatcatttgtgccgatctgccgcacgtatgccggcgatttttttgcgggaacacagacggagaattcttattatttaatgccttggcttcagtacgatcaggaagaggaacgggaccaaaaacatgtttacctttttaaagaggtcgcgaagctccactccgcgactgtgcgggacatccaaatccggactgaagatatcagcggcttttatgaagcaacgaaaagagattgggaaaatgataagcttgtctatgaacaattcgccgaccgggcggaaaaagagtggtatctttcaccttttgaactgcaggctgttacgtatcttacagaaacggtttctgccgtcaattttgctctggaacgtctggaagaatggtttgacgcggcaaaggatcatgacaagacgagagcggtgatcaaccacggcagcttatcgagccgccactttctgtataatgatgcgggatcgggctttttcacgaatttcgagaaagctgcgctgggccctccgcaaaacgacctgctcggcttttactccagaatgttcagaagctatccgaaagcatgcccggaatgtctggactggttttatacgtatcacaaatcattcccgctccgtgaagcggaaatcagcctgtttctcagctatatggcttatccgtccgccatgtacaaagtgctgaaacggtatcagaccggccaaaggggctctgaaaaagaagagtgtacgcaattattaagagcgttttggcagatgaaaaatgttgagccttttctcatgaaggttcatcagattgagcgggagaaaaaaataaaagcggaaaacgagtcctcttcataacgggactcgtttttttatatccattccaaatgcagggcgcacgctaaaaacagcaggatggcaagcagcaggacatcaaaagtcgtcggaaagaaaatcgtcctgatcccctgaaagatcgtaatcgggataatgacttgcacggatacaaggcggatctgtctggcccactgggggagcgaataagaattgaatttttttctcacgggcaattcctcctcacattcgcctttctatgtatcgtatgtaagggaaagggcggggtgcatgcccatttatgtatgacggcagcggtttttggaaaagatgattgacgaatcaaaaacacttttactataataaagaacataataaataagatcatgagctgatataaatacacctgctttgaacgggaagagtacaagaaagacgcatgaagagagagaagctactgtgctgaaaggcttcttatgccgtctcattggaaggtcgcccgggagcataatttcttgaacatacagtagagaaattcgggccgcacccgttatccgtttaagtgcatgaacaaatctgttcatgaaaaaaggtggtaccgcgaaagagcttttcgtcctttatcaggatgaaggctcttttttagttgctcagccatttctaaacatgctggagggttatcatggatacaaacgaacaaacaatgccgacaaaatatgatccgtctgcgattgaaaaaggccgctatgatttttggctgaaaggaaaatattttgaagcgggcggcgatcaaacgaaacagccgtattctgtcgtcattccgccgccgaacgtgacgggcaggctgcacctcggacatgcgtgggatacgacgctgcaagatatcgttacgcgtatgaaacgcatgcagggctatgacgtgctctggcttccgggcatggaccacgccggcatcgccactcaggcaaaagtcgaagcgaaactccgcgaacagggcacaagccgttatgatctcggccgtgaaaagtttttagaagaaacgtggaagtggaaggaagagtatgctgatttcatccgcagccaatgggccaagatggggctcggactcgattattcgcgcgaacgtttcactcttgatgaagggctgaacaaagcagtgcgggaagtattcgtcaagctgtacaaaaaaggcttgatttacagaggcgaatatatcatcaactgggaccctgccacaaaaacggctttatccgatattgaagtaatttacaaagacgtacagggcgcgttttatcatttgcgctatccgttagcagacggttcaggctcaattgaaatcgcgaccacccgtccggaaacgatgcttggcgacacggctgtcgcggttcatcctgaagatgagcgctacaagcacttaatcggcaaaacggtgattctgccgattacaaaccgcgaaattccgatcgtcggcgatgattatgttgatatggaattcggatcaggcgccgttaaaatcacgcctgcccatgacccgaatgactttgaactcggaaaccgccacaatttagagcggattctcgtcatgaatgaagacggaacaatgaatgaaaaagcgctgcaatataacggcatggaccggtttgaatgccgcaaaaaactcgtcaaagatcttcaggaatccggtgttctctttaaaatcgaagaccatatgcattctgtcggacatagtgagagaagcggcgccgttgttgagccgtacctgtccacacaatggtttgtcaaaatgcagccgctggccgatgctgcggttgaccttcagtcaaaagaagagaaagttcacttcgttcctgaccggttcgagaaaacgtacctgcactggatggaaaatatccgtgattggtgtatttcccgtcagctgtggtggggccaccgcatcccggcttggtatcataaagaaacaaaagaagtgtacgtcggccttgaggcgcctgaggacagtgaaaattgggaacaggattcagacgtgcttgatacatggttcagctccgcgctttggccgttttctacaatgggctggcctgatgaaaacgctgaagactttaagcggtattactcaaccgatgttcttgtaacgggatatgacatcattttcttctgggtatcccggatgattttccaaggtcttgagtttaccggcgagcgtccgttcaaagacgtgctgattcacggcttaatccgtgacgagcagggcagaaaaatgagtaaatcccttgggaacggcgtggacccgatggatgtcatcgacaagtacggagcggattcactgcgctatttcctggcaaccggaagttcaccgggacaggatctccgtttcagttatgaaaaagtggaatccacatggaacttcgcaaataaaatttggaacgcctcccgttttgcattaatgaacatggacggcatgacgtatgacgagcttgatctgtccggtgaaaaatcagttgctgataagtggatcctcacaagactgaatgaaacgatagaagacgtaacccagcttgcggatcgttatgaattcggtgaagtcggacgccacctgtacaactttatctgggacgatgtgtgcgactggtatatcgaaatggcgaagcttccgctgtacggggaagatgaagcggcgaagaaaacaacccgttctgttctggcatacgtgcttgaccagacgatgcgtcttcttcacccgtttatgccattcttaacggaagaaatctggcagcaccttcctcatgaaggcgagtcaatcacgatcagctcttggccggttccggtgccggaacatacggataaagaggcagcggcggatatgaaactgctcgttgaattaatccgttctgtccgcaatatccggagcgaagtcaacacgccgatgagcaagcaggttgagctttatattaaaacagctaccgaagacattgccggccgccttgagaagaaccgttcttacgttgaacgctttacgaatccgagcacgctgaaaatcgggacggatatcactgcggcagacaaagcgatgacagcggtcgtcaccggagcggaagtcattctgccgcttgaagggctgattaacattgatgaggagatcgcccgtctgcaaaaagaattcgacaagctgacaaaagaagtcgaacgcgttcagaaaaaactcggcaacgaaggattcattaaaaaagctcctgagcatgtcattgaagaagaacgcggaaaagagaaagactacacggcaaaacgcgaagctgtccggcagcggattgcagagctgaaaggctgataaaacagcggggcggtttcctaagaaaccgccttgtcgtataaaagaggggatttcattgtttaatacgtacaaagaagcgatcagctggattcacggcagactcaagttcggcgttaagccgggccttctccgtatggaaaagctgatggaaaaactggaacacccggaaaagaacattcgcgccattcatgtggcgggcacaaacggtaaaggatcgaccgtcgcttttatccgttccgtgcttcaagaagccggttataaagtcggcacgttcacatcgccttacattattacgtttaatgagcgtatcagcgtcaacggcacgccgatttctgatgaggaatggagaacgctcgttaatgacataaaaccgatagtcgatgagcttgataagaccgatgccggaacggtgacagaatttgaaatcattacagcgtgtgcatttttatattttgcgaagcgggctgatatcgattttgtcatttttgaagcggggctcggcggcacatttgattcaaccaatattgtgaatccgctcctgtcggtcattacaagtatcggacatgaccatatggcgattttaggcaataccatcgaggagatcgccgggcagaaagccggtatcattaaaaattccattccggttattacgggcgtcaatcagccggaagcactcggcgttattgaagcggaagccgataaaaagcaggctccgtatcagtcactatataaaacgtgcagactgtttaatgaagcggcgcttccgtccggtgaaagcttttcgctggaaacggaaacgagatgctatgaaaacattcaaacgtcgctgatcggcattcaccaaagacagaatgcggcattggcgatattggccgctgaatggctgaatcgcctggaagccgcagccatttctgaagaagcgatgcgaaacggcctgaaaaaagcatcgtggccgggccggtttgaacgtcttcaaagccgccctttagtgtttgcggacggcgcccataacgaagagggcgttgaaacgctgatagaaacgatccggcagcgctttgccggtaaaaacgtccatgtcgtattcagcgcattaaaagacaaaccgtatcaggaaatgattgaaaagcttgaaaccgaagcggattccattcactttgtatcatttgactttccgcgtgcttcaagcgccgaagccctttataacgcaagcagtctagcggataagagcttcgatgagaacccggacagtgtgaaagaatggatagaacaaaaagacggggcggatgatgtcatcatcattaccggctccttatattttatttcagaaatgagaaagcggcttatctgacagcccctcggatgcccggcagaccattttacggttttgccgggtgtttttatgctgaaaatatattttcagccatttcagtcatggtgtttttctttgctataatctgagccagattgatagtaaaggtgtggtctgagtgcttttgattctgttttttctcggcttgattttcggttcttttttttatacagcagcgtgccgtatcccgctgcgaatctcggttatttcgccgcgttcagcctgttcgttttgccgcttgccgctctcctggggggagcttgtgcccgtcgtttcctatattctgcaaagaggcagatgcagaaactgtcgtgcgaagctgtcggttatgtatccggcggcggaatgctggacggcgtgtttattcacggctgcaggcattcatttcggtttctcaaaagaactgttagtcgcgctgttatttctgtctctgctcatgattgttactatgacggatctgcaatatatgctgattcctgacaaggttctgctgttttttcttccgcttttcatcgccggccgtatgttttctccgctggattcatggtatgcagggtttgccggagccgtttgcggattttttctgcttgtttttatcatgtttgtcagtaaaggaggcatcggcgcaggtgatgtgaaactgtttggggtgatcggcctgacgctcggcgtgaagctcgtgctcattgcattctttctctccgttatgatcggagccgtatacggtatgtgcgccgcagcccggggcaggcttggtaaaaagcagccatttccgtttgcgccggccatctcagtcgggagcgctttgagttatttatacggtgaagagctgttttcgttttacatcaagctcgcttcaggcggggcttgaaaaatttggcgaacgttttttggacaagacgacaaaagtcttgttcttttttttttcgcctatgctaaagtgtgaaccatgatcagttcaaggtacggccaagacgaatgcaagggggaagagacgttgaaaaaaaggaagagcaaaaagcacagcaacgcaaaaaacaatgcccttaaagtaaccattaacggacaagaagaaacgatgtatggacaagaagatgtgaaagaaggcggggagaaaaccgtcacattttcaaattgggaagaaacaaaaaaggcggagcaggagaccgccgcatcccatgaagatccgaaagaagaagatttcaattgggatcatgagaagaattctgaggtatttgaagatgacccgaaagtcgttcctccataccagaagaaaaaaaacggctctcattttccgaaaaaaaagcagccgtcttctccagttaaaaaagcggtcacgacaattgccgttgcggctgttttaggcaccgggctcggccttgtcgccttaaatatgtcgggaagtaaagaagcctccgctccggcatcagctgacaaaggttcacaagggcagacggcgaaagcgggagatgtttctaaagacaaatctgaaacagccggcacaggagatgcggaatcttcagagggaaactataaaacatatgcggtgcaggccggaaaattttcatcagaaaaaggagcgcaaacccttgttgaccagctgactgaaaaaggatactcggccgtctctctggctaaagaagacggatacacatacgtgatcgccgggcttgcagcggaaaaaagcctatcacagcaattgggtcagacactgatagaccatgattttgaggcttggggcggaaaagagctcagctttgcggtcgattcaggactggaagactcttttaaacaggcatctgagctctccgccaaagcgattactggcaaagatctttcaaaaacggaagtggctgaagcggcaaaagcggcagacggtgcagatgccgctgacaaaaagcagaaagaggccgtgcttcaagcgctgaaagaactggaaacgtcggggtcagaatccggctggaaagcccaaaaagagcttttaagtgttgtaaaatagtatctcatttcccgtcatccggcgggattttttattttgtcatcaaaaagttatttttctgaaattgtggttgcccgtttgatttggtaggatagacaagtatctttttttcttaagcaaaccctgaaaggatgacaatcatgacaaaacgcttaatactcgcatcacaatctccgcgaagaaaagaactccttaatcttcttcagattccttacagcattattgcaagccgcacagaagaaaaattaaatcgaaacctttcgccggaagaaaacgtccaatgtttggccgagcaaaaagccggagctgtattggccgaaaatcccgatgcagtcgttatcggggctgacacgatggtgtgcatagacggcgagtgcctcggcaaaccgcgtgacagggaagaagcggcacacatgctgcggaggctttccggccgaagccatcaagtcattacggcggtcagcattcagacgcatgaccggaaagaaacgttctgtgacacgacggaagtgacgttttggccgctcagtgaagacgacatacagctctacattgaaacaaaagaaccgatggataaagcaggtgcatacggcatccaaggaaaaggcgcgcttttagtgaaaaaaatagacggtgatttttattctgtcgtcgggcttcctgtcgctaaaacaatgagagccttgaaagaatttaatataaaagcttgatgttcaaaccgggaaggggaacaaggaggggttgatcatccgtgatctgccgttaaaattaagagatttccccgaaaaagaaaaaccgagagagcggcttctgcacttcggagccgaacatctctctaacaatgaattgctcgccatcctgctgcggacgggaacgaaacatgagtccgtcatgaacctcgctcaccggctgctgcggacgtttgacgggctgcgactgttaaaaggcgcctctgcccaggagctttccagcattccgggaatcggcacggtgaaagccgttcagattcttgccgcaattgagctggggagccgcattcataagacatccgccggggagcattgcgtcatccgctctccggaagacggggcgaagtatgtgatggaggatatgcgctttttatcccaggagcattttgtctgtttatatttaaataccaaaaatcaagtcattcataaacgcaccgtttttatcggaagtctgaattcatctattgtccacccgcgggaggtgtttaaagaagctttcaaacgatccgccgcgtccttcatttgcgttcacaatcatccttcaggagatcctacaccgagcagggaagatatagaggtaaccaggcggctttttgagtgcggaaatttaatcggcatcgagctgctggatcatttggtcattggtgacaaaaaatttgtgagtttaaaggaaaaaggatatttgtaacactttttttttcgttgatttaagatataatagattttatgagtttttccctttagggtatttttgctttaagaaaggaagatacatacatatgttcggaattggtacaagagaccttggtatagatttgggaaccgcgaatacgcttgtgtttgttaaaggaaaaggaatcgtagtgagagagccgtctgtcgttgctctgcaaacggatacgaagtccatcgttgcggtcggtaacgatgcgaaaaacatgatcggaagaactccgggcaacgtggttgcgctccgtccgatgaaagacggcgttatcgctgactatgaaacaactgcgacaatgatgaaatactacattaatcaggctgtgaaaaataaaggattgtttgcgagaaagccttacgttatggtgtgtgtgccgtcaggtattacggccgttgaagaacgggcggtcatcgacgcgacaagacaagcgggcgcacgtgacgcttatccgattgaagaaccttttgcggcagcaatcggcgcgaatcttccggtatgggagccgacgggcagcatggtcgttgatatcggcggcggaacaactgaagtggcgatcatttctttaggcggcattgtcacgtctcagtcaatccgcgtagccggtgacgaaatggacgactcaatcatcagctatatcagaaaaacatataatctgatgatcggtgaccgtacggcggaagctattaaaatggaaatcggttcagcagaaaccggtgaagaaaatgcgtcaatggaaatccgcggccgcgatcttctgacaggtctgccgaaaacgatcgaaatcacgggaacggaaattgcaaatgcactgcgtgatacagttctctcaatcgttgacgcggtgaagagcacgcttgaaaaaacaccgcctgagctggccgctgacattatggacagaggtattgtattaacagggggaggcgccctgctccgcaatctcgacaaagtcatcagcgacgaaacgaaaatgcctgttcttatcgctgaagatccgctggattgtgttgcgatcggcactggaaaagcactggagcacatccatcttttcaaaggaaaaacaagataatcaggagttaaatagaagaggtgtatcacgatgccgaacaaacggttaatgctattacttctgtgtattatcatattggtggctatgattggattctcgctgaagaacggccgtaataccacctggcctgaaaagctgatcggtgatacgacgggagtatttcaaaacatttttcacacgcctgccgaatattttgcagggttcttcggggacataaaagacctgaaaaacacgtacaaggaaaacgaacgcttaagacaaaagctggacggacagacacaatatgaagcgaagctccaagaactcaaagatgaaaacaagaagctgcgtgatgaactcgggcatgtcaaatcaatttccgactatgatccgattttagcgaccgttatcgccagaaaccctgatcaatggtacaagcagatcatgatcaataagggaacgaagcagaaagtggccaaagacatggctgtcacgaacgaaaagggtgcgctggtcgggaagatcaaaagcagcggactcaacagtttcacatccgccgttcagctgctgagcgatgttgaccgcaataacagagtggccaccaaaatctccggcaaaaagggaagcaaaggctacggtttaattgaagggtacgataaaaagaaacagaccctgaaaatgaccatccttgagccggatgaaaaacgtgaagtgaaaaaaggcgacctcgtggagacatccggaacgggcggcgtatttcctcaagggcttacggtcggggaagtgaccgatgtagaatcagatgcttacggcctgacgaaaatcgcttacgtgaaaccggctgccgacctgtacgatcttgaccatgtcatcgtcgtgaaccgaagcgtagcaacaggggaggaaggatcgtgaaacgtttccttctccctttgattatgattttggtcttttgtgcggaaagcatctataccgatctggtgcgttttcctttcgtttccgtcgagcagcaggtcgttccgcattttcttttgcttgcgctgatttttatgtccgcttatatcaaccaaaagcatgcggtgatctacggtttcattttcggatttctttatgacatcaattatacgggtgttttaggcgtttatatgtttggttttgccggtttatgctatctggcggccaaagcgtttaaagtgctgcagacaaacgccctgatggtcattctggtcgcggtgctgagcgtatgtgtgcttgaattttacgtctacggcattcagacgttaatccgcagcggcacaatgacgtttaacgattttgtcattcagcggttcttgccgaccgctttgctgaatattgcgggggccgttatattagtcctgcccttcaggctgttttatataagtctgaagaaagaattaagagatgagtaaaaaggattttatctttttttgacgaaaagagtatgttgttgaggtgaacattgatgaagaccaaaaagcagcaatatgtaacaataaaaggaacaaaaaacggcttaacattgcatctggatgatgcgtgttcttttgatgagcttctcgatggtcttcaaaacatgctgtcgattgaacaatatactgatggcaaaggccaaaaaatcagtgttcatattaaactcgggcatcggtatctgtatcaggaacaggcagagcagctgactgatctgatcgcgtcaaagaaagatttagtcgtgcattcaattgacagtgaagtcatcgccaaagaagaagcgcagcggatgaaagaggagcaggaaattgtttctgtttccaaaatcgtccgttcgggccaggtgcttcacgtgacgggagatttgcttttaatcggagatgtgaatcccggcggtacgatcagagccggaggaaatatatttgttctcggttcattaaaagggattgcccacgcgggttataacggaaataaccgggctgtgatcgccgcatccgaaatgatgccgacacaattgaggatcaatcacgtgttaaatcgctccccagaccacattcaaaaagggaacgacatggaatgtgcttatttagatactgacggaaatatggtcattgaacgccttcagcaattggctcatttaagacctgatctaacaaggcttgagggaggaatgtgaaattgggtgaggctatcgtaataacttcgggaaaaggcggagtaggtaaaacaacaacatctgcaaacctcggtaccgccttagccattttagggaagcgcgtctgtttggtagacacagatatcggactgcgcaaccttgatgtcgtaatgggtcttgaaaacagaattatttacgacttagtagatgtaattgaaggcagatgcaagacgcatcaagcgcttgtcaaagacaaacgttttgatgatctgcttcatttaatgccggctgcccagacaagcgacaagacggctgttgtccctgagcagatcaaatcgcttgtgcaggagcttaagcaggaatttgattatgtcattattgattgtccggccggaattgaacaaggctataaaaatgccgtctccggagctgataaggcgattgttgtgacgacgccggaaatatcagcggtgcgggacgctgaccgcattatcggacttttggagcaggaagatattgaaccgccgcgccttatcgtgaaccgcatcagaaatcacctggtgaaaaacggtgacacgatggatgtggatgaagttgttcatcatctgtctattgatctcctcggaatcgttgctgacgatgatgaagtgatcagggcttcaaatatcggcgaaccgattgccatgaattccaaaaaccgcgccagcattgcgtaccgcaatatcgcccggcgcattttaggagaatccgttcctttgcaggtgcttgaagagcagcaaaaagggatgatggcgaaaatcaagtcatttttcggcgtgcgttcataatatataccagaatacaaagatctgatgaagcccagcttatcaggtcttttttgtttttcaagagcgcatatttgcaatggacaagacataggatgtacaaacccaacgattgcaaaggatgatggcgatgagtcacagagctgatgaaattagaaaaagactggccaaaagaagaaaacagcggcctgaatcaaaacggactttcgttcaaaacgcccgaactcaggattttcccgcgtggcagacggtcaaggagcaggaaaagcacaagcttctaccggactacgaatatcaaacggaacacccgcccgaatttaacggacggcatccattgatcagcgctcattctattattttaaaatgcctgctggccgcctgtctcgtactgatctccgctattgcctataaaactgacaaacagccgttgagtcagatcaaaccggcgatcgcacaaacctttcaaaaggaatttcagtttgctgccgtaagcaattggttcgtatcttccttcggaaacccgctcgcttttcttacgccgggaacgaaaaagaaggacggtcaggtggcggtcagtcaggatatggccgttcctgccgcggggaaaatccagcaggactttcaaaataacggagagggcgtcgtcgtcgaaaccgccagcgaagccattgacagcgtaaaagaaggctacattatggaagtgagcaaagataaaaaaacagggctgacggtgaaggtgcagcacgccgacaatacaagcagcatttacggccggctaaaagatgttaacgtttcattgtacgactttgtcgataaagggaaaaagatcggttcgatcaagcttaacgataaaagtaaaggccagtactatttcgcgatccaggatggcgataaattcatagatccgatccaggtgatcacttttgatgaataaatggctcagcctccttttcaaagttcatgtccatccttttctttggattatcatggggcttggtcttatgacggggcacatcaaagcgctgctgtgtcttttgctggtcgtatccgttcatgagctggggcatgctgctctggctgtgtttttttcgtggcgcataaaacgaatctttctgctccctttcggcgggacggttgaggtggaggagcacggaaaccggccgcttaaagaggaattcgcggtcatcctggcaggcccgcttcagcatgtgtggcttcaggcggcagcctggctctttttcatgtcaggttttgcaagtgagcagacatttgagatgtttaccttttataatctctctattcttttcatcaatcttttgccgatctggccgcttgacggcggaaagtttgtgtttttatacttctccaaacaaatggcttttcaaaaagcgcatctcctcagcctgcagacatcggccgtttccgcgcttttgctctgctgctggattgtgctggccgtcccccttcaggtcagtgcatgggtgctgttcgtctttctcgccgcttctttatgggatgaataccggaagcggcactatattcagctgaggtttcttttggagagatactacggcaaaaaccgcgatgttgccatgctacatcctttgacggtcgcggccgatgccaaagtaaagcatgtcatggccgaattcaaacggggatgcaagcaccccattatcgttgaaaaagccggcgaaaagctcagccagctcgatgaaaatgaagtgcttcatgcgtattttgccgataaacggacagattcctctatggaagacctgctgctgccttactagaaatagattgacatatccttttggttctgatatattttttaatgttatggatgtagcaccaatgctacaaccgctcgggacaggtgataagagctttaaagccccctgttgctggcgagtcttagtctaataggaggtgcagagaatgtacgcaatcattaaaacaggcggaaaacaaatcaaagttgaagaaggtcaaactgtttacatcgaaaaacttgctgctgaagcaggtgaaacagtgacgtttgaagacgtattgtttgttggcggagacagcgtgaaagtcggcaacccaacagttgcaggcgcgacagttacagctaaagttgaaaaacaaggccgtgcgaaaaaaatcactgttttccgttacaagccaaagaaaaatgttcataaaaaacaaggtcatcgtcagccttatactaaattgacaatcgaaaaaatcaacgcgtaagcatgattgaggcaacaattcgaagatcccggaatgacgggggcatattgtcctttgaaatgacgggacatgccgattttgctgaacatggacgagatctcgtatgcgccggggtcacggctgtcgttttcggagcggtcaatgcggttatcgcgctggctcctctcgaaccgattcttgatataggcgaggacgggggttatttctactttgaattccctgaagctgctgatcaggaagctttgcaaaaagcgcagctgctgattgaaggcatgattgtttctcttgaaacgatcgagcgggattacagtgaacacttacggttgactgcaaaccaaatataggaggtgagttacatgcttagattagatcttcagtttttcgcttctaaaaaaggtgtaggttctacaaagaacggacgtgactctgaatctaaacgtttaggcgctaaacgtgcagacggtcaattcgtaacaggcggatctatcctttaccgtcaacgcggaacgaaaatctacccaggtgaaaacgtgggccgcggaggagatgacactctttttgctaaaatcgacggaactgttaaattcgaacgtttcggccgtgaccgcaaaaaagtgagcgtatatcctgtagctcaataatgacacaaaaaactccggtcgttgactggagttttttttgcagtaagcggagtaacatcaagaatgaaaagcagaggatgcgtgagtgaaccccgccttgaatgaggacatcagcttcccatacccactggatatgttccccaagcagtgataccaaaaatgtttctgcctggcatccgcatagtatgcgatccgaaaaaggaacatgatgaaccaggaaaaacaagtgtttttttaacaaagccttctctgttataattcatagtacacacttatcaagactcctaaaaagaaattaaacgattgggagtgcgaaaatgaaggatgtatcgaagaaacaagaagaacctgtaagcgatgcggctctgatcaatgagctgatccaattaatgggccatttccgtcatgattggatgaataagctgcagctgataaaaggaaacttaagtttgcagaagtatgacagggtcgttgaaattattgacgaaatggtcatagatgcaaagcacgaatcaaagctctcaaacctgaaaaccccgcacttggcgtttgactttcttacatttaattggaagtcccgttatatgaggctcgaatacgaagtgctcggagaaattaaagatttatcggcatatgatcaaaagctgtcgaacctgatgagaaaactgtttcatctgttcggtctggcggtaaacaatgaaagtgaaaatcatctgaccgtatcgctgcagacggatcaccctgacagacagcttattgtatatctcgattttcatggaacgattgcaaatgcagatgtgtttgatgaatttcgcaaatcccggtatgaggactttgatgtcatgcaatttgagctgaccggccatgaatgtgtggccgaaattggaatgaactagcggttttttacggtttagaacggaggatattatgtttgtagatcaggtgaaagtatatgtaaaaggcggcgacggcggtaacggaatggttgcgttccgccgtgaaaaatatgtgccgaaaggcgggcctgccggcggtgacggaggtaatggaggcgacgtcgtttttgaggttgatgaaggactgcgcacgctcatggacttccggtaccagcggcatttcaaagcgatacgcggcgaacacggcatgtctaaaaaccagcacggcagaaatgcggacgatatggttgttaaagttccgcccggcacagtcgtaacggatgacgatacaaaacaggtcattgccgatctgactgagcacgggcagcgcgccgtcatcgcaaaaggcggacgcggcggacgcgggaatacccgctttgcgacaccggccaacccggcaccgcagctgtcagagcacggagagcccggaaaagagcgctatatcgtgcttgaactgaaagtgcttgcagacgtaggtctcgtcggcttcccgagcgtcggaaaatctacgcttctgtctgtcgtttcatcggcaaagccgaaaatcgccgattatcattttacaacgcttgttccgaatctgggcatggtggaaacggatgacggaagaagcttcgtcatggcggatctgcccggtttgattgaaggagcgcacgaaggagtcggcttaggccaccaatttctccgccatatcgaacggacgcgcgtcatcgttcacgtcattgacatgtcagcgatggaaggccgtgatccgtatgaggattatgtgaccattaatcaggagctcagtgaatataatctgcggctgacggagcgtccgcaaattatcgttgcgaataaaatggacatgcccgaagcggctgaaaatcttaaagcgtttaaagaaaagcttcaggatgatcaccctgtcttcccgatcagcgcggtgacgagagaagggctccgcgatcttctgtttgaagtcgccaaccagctggaaacaacgcctgaattcccgctgtatgatgaagaagaactggcggaaaaccgtgtaatgtacacgatggaagatgaagaaattccatttaacattacccgtgatccggacggtgcgtttgtgctttcaggtgacagcctggaacgcctctttaaaatgactgacttctcccgtgacgaatccgtcaagcgttttgcaagacagatgcgcggtatgggcgttgatgaagcgctcagagaacgcggtgctaaagacggcgatatcatccggcttctggaatttgaatttgaatttattgattaaaaaaacggagagcttgcgatgcaggctctctgatgtaaaagggaggggtgcaggtgaaagaagagacattttatttagtgcgtgaagacgttctgcctgatgcgatgcggaaaactctagaagtcaaaaagctgctggacagaaaaaaggctgaatcggttgcagatgccgtgcagaaagttgatttaagcagaagcgctttttacaaataccgagatgcggttttccccttttacacgatggttaaagaacaaataatcacacttttctttcatttggaggatcggtcaggcgcgttatcccagcttttgcaggcggtggctgactcaggaagcaacgtgctttccattcaccagacgattccgcttcagggcagggcgaatgtcacgctctcaatcagtacgtccgcaatggaagaaaacattcatacgttaatgaataaactgagaaaatttgattttatagaaaaagttgagatcttagggtcaggcgcgtaaggagagaagagacatgaaagtcggttatttagggccagaagccacatttacacatctagcagtcagttcctgctttcaaaacagcgtgacacaagcaccttatcaaacaataccggcatgcatggatgcggcggttgcgggagaagttgatcttgcatttgttcctttggaaaacgcgctggagggctcggttaacttaacgattgactatttgattcatgagcagcctcttgcgatcgtgggggaaatgacgctgccgattcaccagcatctgctcgttcacccttcgagagaaaatgagtggaaaaagcttgagaaaatttattctcattcccatgcgattgcgcaatgccacaaatttcttcaccggcatttttcgtccgttccttatgagtatgcgaagtcaacaggtgcggctgccaagtatgtcagtgagcattcggaccttccgatcggcgtgattgcaaatgaaatggccgccgctacatacggattgagcatcgtgaagcgggatattcaggattatcaggacaaccacacgagatttgtcattctttcgcctgaaaaagacgtctcattcgaagtgaatgcgaaactgtcttcacggccgaaaacgacgatgatggtaacgcttcctcaagatgaccaatcaggtgcgctgcacagggtgctgtccgctttttcatggagaaacctgaatttatcaaagatcgaatcgcgcccgacaaaaacgggtctcggcaactatttctttattattgatattgaacaggcgatggatcaggttctcattcccggtgccgttcaagagatggaagccctcggctgccgggtcaagcttctgggaacatatcaatcctattcgatataaaaaaagcccttcagggggcttttttttaatcttttattaaaatacccgcgtcgtccagcgcttggcaggcttggtcaatccgctcttttgtcggggcgcttaacgtatggaggtgcacgcctccggtcagctgtgaaaggtaagcggcatttgtcgagttaatgtgatccatgaattgtttgacttctttccgtgtgctgactcttatggcggcggttaaatcgccgtatacggggtgttcaataatgacgtcctttatggtgacgccttcatcgacaatgagttcaagctcttcttccgtccgctccgggccgtgcagacaggcgacaatccgttcggcgtttttttcaccgccggcattcatgctgatgtataagtagccttggctcgtcgcgatgatcggctcgttttttgctttcaagagtgatatgtcctgtacgatcacctgtcttgagacatttgcttttttggctaattcgcctcctgttaatggcgagccggcttctttcagccaatgaagcagcatgtcgcgtcttttctccccagtaagcttcgttccttctgtcaaattgctgattctcctttcttttgctcccacagcgccgtaaatgtatgtatcagcatatcgagctgttcacatgttgtttcgtttccgaatgagattcggaaaaactgccgcgcttcccgttcggtttttctcagcgccttcatagctgaagaagggccgtggctgccggcggaacatgcgctcccggttgagatgcaaatatcgttacgattacattctaacataatatattgtccttcaaaggagtgaaaaaaacacccgacaatgtggggcaggcattcaccgccggtttcttcctctgaaaatgaaatggggaggccttgacgccgaatttggtcatacaaataattcctcagcctgtcagcatgcttacggtgttcctccatatgtttcactgcatactccgcagcagcggtaaaagcgccgatggccggcacattcaccgtaccgggcctgaacccgttttcatgcacggtatacggataaaccgggttccagctgacaccgggccgaatgtaaacagccccggtgcctttcgggccgtatactttatgaccggagacggaaagggcgtcgattcctgcctgatccgcatcaatcggcagtttgccgaaactttgaacacaatcgcaatgcagcaaaatgtttcgatggtgaagaaaagcggccaggcgatccactggctggatgaggccggtttctgaattggcgtgctgtatggaaacgagccccgtgtcaggacggatatgagccgccagtatgtcctcggttataagtccgttctcgtcgggatatatgatggtgacatcaattccccgatcagctaaaaacgccgcggcattatggatcgaatggtgttccattgcggtcgtaataaaatgttttttgtgaacgggcagaccgtgcagcaatgattggacggccaggatgttcgcttccgttccgccgcttgtaaagtaaatgccgtctgcggctccgccgatcaattttcctgcagaatgtctgcaatattccagcacgtccgccgctcttcctccggcgtcatgaaggctgcttgcattgccgtatacctctgtgctgagatgctgaaagacttttgcggcttctttgcttaaaggcgctcccgccgcgtaatcaagataaatcatacagcccgtctcctatccgtttatgttaaaaaaaagcttgagtttattttatcgctgtgtaaatataggtgtcaagacaggtgtaaatataacaggagggtgatgtatgtctgaaaaaacaattatcgtcattggttccgggacggcggcccttgcctgtgcttcctcatttcctccgtcataccaagtgaccgtcatcacaaagagaaacgtaacgaacagcaattcgcattatgctcaaggcgggattgctgtttcatacgcaaaagatgactctttagaatcccatgtgaacgatacactgtatgcgggatgcggacacaatgacgtgacagccgtgcggcatttgctgaaaagcggacagagcatgataaacaggctgatagaaggccatttcccttttgatacgaagtcggacggaacgttttgtctcggcagggaaggcgctcattccaaaaggaggattctgcacgccgggggagatgcgaccggacggatgttggttgagtttctggttcagcagctgagggacggcatacggattattgaacacgagacggttgttgatctgctgattgaacacggacgatgcgcaggcgttgccgtaaaggatgcttcagggactgtttcttacagaagagcggattgtgtagtgcttgcatcaggcggctgcggcagtctgtaccaatatcacacaaatgattccgccataacgggagacggcatcgctcttgccttccgcgctggagctgagatcacggatatggagttcacccagttccacccgaccctccttgtgaaaaacgggactgtgtacggcctgatttctgaagcagtgagaggagaaggaggatatttagcggatcgcttcgggcgcaggatcatggctggcagacacgcactagaagatttggcgccccgggatgtggtttcacgggcgatttatgaagaaatgatgaaagaaaatcctgtttttataaattgcagccgaatagccgattttaagaaacgttttccgaccataacagaaatttgtcaaacagccggtgttgatcttgaaagcggaattcccgtagcacccggaatgcattttttaatgggcggagtaaaagccgatacatgggggaaaacatccgtgcctgatttgtacgccataggcgagaccgcctgcacaggattgcacggggcgaaccgccttgcgagcaactcactgctggaagcgctggcaagcgggcaacgatgtgctgaacatatcattcaaacaccgttaaacggaagatataaaaaaaccccgaagaaatttgacgtcatcttagaagtgccggacacaacgcttcatgtgctccaagccaaaatgacaaccggagcgggcatcgtcagggaaaaagaaaacatgcaggcgctggcatcctggcttaacaacgtatctgtgcgtcatataaatgtgaaggatatcacaatagaacaagccgagctatcctgcctatggaagactgcgcaacttgttgtgacctcagcccttattcgggaagaaagcaggggcgctcattttcgcgctgattttcccgggacggagaaagagtggcacggaaaacaaatcattcattcaacatctggaacagttatcagaaaaaacgaaaggattggggaactatggacattctgcagctgaaacaaatgctgactcatttttttcaggaagatatcggaacgggtgatgcgacgtcacaagcgattttttctgatcagcaatgtaaagcgcgaatcatcgcaaaaacagatggcgtgtttgccggagaagccgttatccgtgaaggatggaagcttttacacgatgatatccgcatccgctccctgaaaaaagacggagaacggatgaaaaaaggagacgtgctcgctgaaatggaaggccaggcggcggctcttcttacgggggagcgggtcattctgaatctcttacaaagaatgtcaggcgttgcgacaatgacggatgaggccaaaaggcgtcttgatgatccgtccattaagatttgtgatacgagaaaaacgacacccgggctcagaatgctggaaaaatacgccgttcgggtcggaggcggctttaatcatcgcttcggcttatatgacggcatcatgataaaagataatcatattgccgcctgcggatcgataaaggcggccgtggagcgggcaagaaaaacggcggggcagatgcttgcggttgaagtcgaaatcgaatccgaacagcagctgctcgaggcaatagaagcgggcgcagacgttattatgtttgacaactgtccgcctgagtccgtccggcgttttgcaggcatgacaccgggccatatcaaaacggaagcatctggaggcataacgctcgacacattgcccgcttataaaggaacgggcgtccaatatatttcactcggatttctgactcattcagtaaaaagcgccgacatcagcatggatgttgaggctgcggaacagggggatttttaagatgtctatttttgacgtgttaactgcatcagccgaaatgatgccgagccattataaagacatgagcaccggagaaatggagaagcgggtcgctgccattaaacgggatttcggaaagcgcctgttcattccggggcatcactatcaaaaagacgaagtaatacaattcgccgatacggcaggtgactccctgcagcttgctcaagtggcagaaaaaaataaagaggcggaatatattgtgttttgcggcgtgcattttatggcggaaaccgctgatatgctgactggtgataaccaaaccgtcattttgcccgatatgcgcgccggatgctcgatggctgatatggcagatattcagcagacggacaaagcatggcaagagcttcaagaactgtacggtaacaccatcattccgttaacatatgttaactcgacggcggaaattaaagcattcgtcggacggcacggaggagcgaccgtcacctcttcgaatgcccggagtgtgctgaaatgggcttttaaacaaaaagagagaattttatttttgccggatcagcatttaggcagaaatacagcctatgatctcggcattccgctgacagaaatggctgtatgggacccggggcagaaccgattgcttactgaccatccggaaaacattaaagtcatcctttggaaagggcattgctccgtacacgaaaagttcacagcggaaaatatttctcagctgcggcagcgggattccggcatccgcattatcgttcatccggaatgttcgagggaagtggtctcgctcagtgacgacagcgggtctaccaaatacattattgatacgattgaacaggctgaaccgggaagcaagtgggcgatcggaacggaaatgaatcttgttcagcgcctcattcaatcgcatccggataaacagattgaatcattgaatcccgatatgtgtccgtgtctgacaatgaacagaatcgatctgccgcatttattgtggtcgcttgagcagcttgaaaaaggcgagctgaagggtgtcattaaagttccggaagcggttcggacagaagcgcttcgtgctttgaacagaatgctgagtcatacgtagttataaaaatttcccctccttcccaaattttttatcatcatgcccagtccatcggcatatagtgtgaagaaacgtattgtaatgacaaatgtaccgttcacgttttgtgcataggaggggaaaacgttgaaaattcatatcgttcaaaaaggcgattcgctctggaaaatagctgaaaaatacggagttgatcttgaagagttaaaaaaactgaatcatcagcttagcaatccagacttaattatgcctggaatgaagataaaggtgccttcagaagccgttccggtcagaaaagaacctaaggccggcttcggaacgtctgcgcataagcatgagcatccatatgccaaagaaaaaccgaaatcagttgtggacattgaagacaccataccggaagaaccaaagccgtcgattccttatgtgccgccaatccctgaaaagcatgaaaatgtgctgccggaagctgatatgaaccaatattacccgtccaatcagctgtttcagccgtggtcgcctcctaagccggaggaaccggtgacacattttgtcgagccgaaagaaaaagagcatgacaataacattccacaacaggaggaaatgatcaacatggaaaacgcgaattacccgaatatgccaaaggcgcctgaagccggaaagatggaagaagaaaacgccgcttatcatctgccgaacatgccaaacattccgaatgtcccgtttccgaatatgccggccgttgaaccgccttttatgcattacccgatgccgtgcatgccttgtccttgtccggttccggtgacaccgatgctgccgggttctggattatgccatccgtgcttcccggtaggcggaggtttcggcggttttggaggaggtttcggaggctttccggtcatgccgatgccgttaccgtacggattccatcatccgggatttgggccgcatgcgggttacggtgaatatgaaaatcaggcccatgaaaatgcagagcattatgatggttctgcatctggtttcggcggtgctccttacggtcaaatgccgtattacggcggatattcgtcacattacgcacacgcccctcatcatgatggaaaatataaggatgatgattgcggctgccatgattcacatcatcaccatcatcaccaccacggttcacatcaccatcacgcaaatatgcctgtgcagccgtatccgaatatgggtgcaaacgcaggacattttatgccttacggcggagcaaatcccaatgtcgcgccgaatcagccgagtccaaatcaagtattcggacggccggaggaagaagaagattaatgtttcgggacgatgtatgtcgttcctttttttatgtccaactgaggaatggacataactgacaagcttaaacccgccgcctgacgcacatcctaaacatgagcggaaaacgctcaaacagcgatgaatccacggggggtttttccattgggtaaaaaactgatgacgatcgcgggcgttttagccgtgacggcaagcttaacggcatgcggagcaaataatgccatgaatgacggacgctacaatcagtcaacacgtccggtcggatattattcgaatgataatggtaacggcagaggccagtacggaatggaccatcaaggacccgtttctgaaatgatggaaaaccgaaacggccgtcataatacgacaaatgtgtccgaccagtacgcccctaatgacggggttccgttaacgacggacggcacatataacggccgaaatgtcaatacgccgccggcagcaatgtcttataatgggtatgacaacgccgaaaacatcaggttggcggcaaaagttgcaaaccgcgtgaaaaaagtaaagggcgtacaggatagtcaggtcatcgtgactgacacgagagtcgtcattgccgtcagaacaaatcatccttttacgaaaaatgatgataaacatgtcaaacatgcggccaaaaaattcgcggacggccgtacaattcaagtgtttaccgacaacgctacttttacaaagctgcaagacatgaacagaaacagccgttaaacgggactgccggatgatttcatccggcagtatttttatggataaagcttcatcatttctttacatattcttaaaacgctctttatattgcggtgttaacataaaaataataaaacgtaacggaggggccgggatgaaaaaaacggagcatgacaaaagccgcggagcaaaaactgtgtatctgaccgtaaggggataccggctcaaactgacgcccggacaaatgaaactgatttcagccggccgggcgtaatcatcggggcagccctcatatagagagctgctttttttcggctgaaacagacaaatgaaagaaaacggttaagcaccggcatctttggtcaaactagcatcaagagtttgattgaataaagaggtgttattggtgaaacgaatttgcggtgctcgtctattgtttatgcttatcttatcggctgcagtcctgatttgcggaggaaaaggcgcatacggggcggaggtcgagcattacgggccgcttcgggtgcatgtccagctggaaaaggtctatcttgacggtgatgtcggcattgaacatacggatgaaaccgttttagcgatggaggatttttgggccgcatatgccggctggacgctcgttgagcagaaaaaaggcttcgtccttttccgtaagcatgttgatgatatttctccgctcagtaaggttaacggttatatcggcgtcacggacggaggcgtcatctccacttttcacggccgtcccggatcgctggccgagccgattcagtctttcttccagattgatatagaaaggctggaaagccgattgcaaaagcacttggaacacggcataccgtacagaacaaaagcggagtttgagagcgtgatcgatcatattaagacttacagcggatgactttgacgcaagacatgtgacacatgtcttttttttctgaatggaaggtgtcaaagcgaacatacgttaacttttctataagactttggctgtttttgtgttacaatgataagcagtcaaagaggtgaataggtgtgattgaattcgtgaaggggacgattgattacgtatctccccaatacatcgtgattgaaaacggcggaatcggctatcaggtcttcactccgaatccgtttatttataaggtaagcaatcaagagaccatttttacgtatcatcatataaaagaagacgccttttctttgtacggtttttcaacccgggaagaaaaagcgcttttcacaaagctgctgaacgtcaccggcatcgggcctaaaggggcgctcgccatcctcggttccggtgatcccggagccgtcatcgaagcgatcgaacaggaagatgaagcctttttggtgaaatttccgggtgtgggcaaaaaaacggcgcggcagattattcttgatttgaaaggcaaactggccgacgtcgtgcctgaaatgattgacaacctgtttaatcatgaagcgcgcattgaaaaacaagaggctgaaacggcgcttgacgaggcgcttgaagcgctccgggttctcggctacgccgaaaaagaaattaaaaaagtgcttcctcacttaaaagaggaaacggcgctttcaacagatcaatatgtgaaaaaagcattgcaaaaattattaaagtaaggtgatgttcatggatgaacggctcgtttcaagtgaagcagacagccatgaatcaataatcgagcaaagcctcaggccgcagaatctcgcccagtatatcggccaaaagaaggtgaaagaaaatctgcgcgtgtttatcgatgcggcaaaaatgaggcaggagacactggaccacgttcttttatacgggcctccgggtctcgggaaaacaacgcttgcgtctatcgtggccaatgagatgggtgtggagatgcggacgacgtcaggtcccgccatcgaaagaccgggagatttggcagccattttgacggcgctcgaaccaggggatgtgctgtttatagacgaaattcacaggctgaaccgctcaattgaggaagtgctgtacccggcgatggaggatttctgccttgatatcgtcattggaaaaggcccgtccgcccgctccgtccgtctcgaccttcccccttttacgcttgtaggagcgacgacaagggtcggattattgaccgcaccgctcagagaccggttcggggtgctgtcgcgccttgaatactatacgcaggaagagctgacagatatcgtgtcaagaacggctgacgtttttgaagtggatatcgaaaaagctccggctctggaaatcgccagacggtcaaggggaacgccgcgggttgcaaaccggcttctcagaagggtgagggattttgcccaggtgctcggcgacagccgcatcacggaagaaatcgctcacgacgcgctcgaacgtcttcaagtcgatgcgctcggccttgaccacattgaccataagctgctgatgggcatgatcgaaaaattcagcggaggtcccgtcggccttgatacgatttccgcgacaatcggcgaagaaccgcatacaatagaggatgtgtacgaaccgtatctgctgcagatcggatttctccagaggacgccgaggggacgggtcgtgactccggctgtgtatgaacattttcgattggaggcgcccgcccgtgactgactttccgaaggttctcatggttctcggtgccgttttgcttattgccggcgcagtctggcactttgtcggaaggctgcccggagatattttcgttaagaagggaaatgttacatttttctttcccgttgtcacttgtattgtgatcagtgtgatactatccattctgcttaattttttcggcagaatgaaataacaatagacagaataaaggtgaaatgatgaaagtcgatttatttgattttgaactgcctgaacgcctcattgcccaagtgccgcttaaagagcgtgacgcatcgcggcttatggtgctcgacaaacagacgggcgggctgacggacagttcatttaaagagattgtaagcttttttaatgaaggggattgcctcgtcttgaacaatacccgtgtgctgcctgcgagattattcggcacaaaagaagatacgggagcgaaagtggagcttctgttattaaaacaggaagaaaatgatacatgggaaacgctcgtaaagccggcgaaacgcgtaaaaaaaggaacggtcctgacatttggcgacggccggctgacagcggtctgcacggaggagcttgatcatggaggcagaaaaataaaattccggtatgacgggattttttacgaagtgcttgaatcactcggtgaaatgccgctgcctccttatattaaagagcagcttgatgataaagaacggtatcagaccgtcttttcaaaagaaatcggatctgccgcagctccgacggccggacttcattttacggaagagattctggacgagctgaagcaaaagggtgtgcggattgaatttatcacacttcatgtgggactcggcacattccgcccggtcagtgcggatgatgtggaagagcataacatgcacgcggaattttatgaaatgacggaagaaaccgccgcctctttaaacgaggtcagaaaggcgggagggcgcattgtgtcggtcgggacgacatccacgcgcaccctggaaaccattgccggcgagcatgacggcgtatttaccgcttcaagcggctggacgtccatcttcatttatccgggatatgaatttaaggcgattgacggcatgatcaccaattttcatctgccgaaatcttcccttatcatgctcgtttctgcgcttgccggcagagagcatgttctttccgcctaccgtcatgcggtagaagaggaatatcgtttcttcagctttggcgacgccatgctgattatctaatttgaatgacaggaggcctcatacaaagtggctgaacaaccgatacgttatgaatttataaaggaatgcaaacaaacgggagcgcgcctgggcagagtccatacgccccacggctcctttgagacgcctgtatttatgccggtcggcacgcttgctacggtaaagacgatgtctccggacgagctgaaatctatggatgcgggcattattttaagcaatacgtaccatttatggctccgcccgggacacgacattgtaaaagaagcgggcgggcttcataagtttatgaactgggaccgcgcgattttaacggattccggcggttttcaggtcttttcattgagcaagtttcgtaatatagaagaagaaggcgttcatttccgcaatcacttaaacggagacaagctgtttttatctccggaaaaagcgatggaaattcaaaacgccctcggctctgatatcatgatggcgtttgatgagtgtccgccgtatccggcagagtatgattacatgaaacgctctgtggaacggaccagccgctgggcggaacgctgcctggaggcgcacgggcgctcagatgagcaggggctgttcggaatcgtacagggcggagaatacgaagacctgcggacacaaagtgcaaaagacttggtttcgcttgattttccgggttatgccataggcgggttatctgtcggcgagccgaagcacgtcatgaaccgagtgcttgagtttacaactccgcttttaccgaaggacaagccgagatatttaatgggtgtgggttcaccggatgctttaattgacggcgccatccgcggcgtggatatgtttgactgcgtactgccgacccggattgcccgaaacggcacggtgtttacgaatgaagggcgtctgaatatgaaaaacgccaaatatgagcgtgatttccgtccgattgacgaagagtgcagctgccatacatgcaaaaattactcccgcgcttacatcagacatttgatccgctgtaatgaaacgtttggaattcgattaacaacttaccataaccttcattttctgttacacttaatggagcaggtcagacaagccatccgggaggatcgtcttggtgatttccgagaagagttctttgagcgttacggctataataagccaaatgcgaaaagcttctaaataaaaccattcttgaaaggagggaaacagatgggtactttaggcacaatcgttcctattattttaatgtttgcagtgctttatttcctgctcatccgtccgcagcaaaagcagcagaaggccgtacgccagatgcaggaagagctgaaaaaaggggattcagtggtgacaatcggaggattgcacggcactgttgattcaattgatgaaagcaaggtcgtcattaaaacaggtgataacacccgtttaacatttgaccgccgcgcaatcagagaagcttccgctgaataacagcgaagctcatacatacaaaaaaagagcggagaatccgctctttttttattacgctgatctgcttcctttcaaattcactccgaaaatgccgcccagcatgctgactcccaaaaagccgagatgaaacaaaagctgaccggatgtaaacgtttttccgaaccctaaatattgaaacagcaagatgattaatgaaaaacagacggcggttaacgctccgatcatccagcctttttccttcgctttgccgcccgatataaaaccgcccgcaaataaagaaagaaaggaaagcgcggtgatcagccagctgaaagatgactcttccattgaggtaaccgtcagtaaaagcgaaatcgccaaactcgtaagaagcatcaccgcaaagatagccactaagccgtacaagacgcctcttcccacttgtttcgtttcttccatttttatctcctctccgccctgcggcctgatatatgacaagccggagcccgtctttttctaaatgtattctctgaatgttcgaattagacgtaaatgcatgatgttcagcccgtttcttacataattcagagccgatggcaaatgctatgaccgttggaggtgcgatatggaagatattttcattattacgtttcgtacgattgtgctttattttatcattcttgtgattttcagactgatgggaaaacgggaaatcggagaactgagcattttagaccttgtcgtctccattatgattgccgagattgccgtattggcaattgaaaatgtaaaagataagcttttgcatacgattgtgccgattgtcgttttaatgattattcaagtaagccttgcttttatttcgctcaaaagccaaaaaatacggcagctgcttgacggaaaacccaccattattataaaacagggaaaaattgatgaacgggcgatgagatcgcagcgctacaattttgacgatcttcttatgcagctgagggagaataacatcgatagaatctctgacgtgtcatacgccattttggagtcttcaggcaaactgtcgatcgtcaaaaagaaaaagaataaggataagcagatggaaacatcgcttatcgttgacggggtcattcagaacgagcatctagacagaatcgggaaagataaacactggctcgaaaaaaatttagcaaaaagaggatatcgcgatctttcggttatatcattctgcacgtttacggacggcgctttttttattgatcttaaagatgaaaaaggggagccatgaatcggtttcaccgcgtgacgaacttgccgatgaccggaatccggatcagctcttcccttttaatcagcttgaataacagaagaagcgcaatgtacaaaatcgcggtcattgcaatccagcctgtgagattaacagcctctgatcctgaaaaatgaacggcgtgcttgatgatgcggctgacatagccgcaaatgaatatgacggcaaaacagagcgcgtattcttttattttaatgctgatcggaagcaccttgcttacggtggccgcatgcagcagggtgacaagaaccatccccgttacaatcgcaagtgcggcgcccatgatgcccaaggaaggcctggtcgccaaaacaaaaattaggccagttttgacagcggcgccgataaaactgttcatcatggcggccccggctaaattgagagcctgcagcaccgcctgaaggggcccctgaaaatagtaaagcagaaaaaacggcgccatcactttaacaaataccgccgcattcgttgatccgtacatgacggacatcagttcatcagcgaaagagaataaaataaccaccgaaatgcctccgcttaaaagacacagcctcatcgcctgttccagacggtattcgacaacttgcagctttttttgctccattccttcactgatcgcaggaacaagtgccgttgacagagaataggttataaagctgggcagcgtcaaaaccgtcatggcaaatccggtcagctccccgtactggctggtggcggcagcggtggccactcctgcaatcgcaaggctttgcgcgacgacaataggttcaaaaaaccaagataaatttccgatgaagcggcttccggttgtcgggagcgacacgctcatcagctggcggaaggtttcttttccatttgcgatcgacttgaaaaattgttttctgattctgattgttttatttgctttaaaacaaatgaataaataaataagagaggcaagctccccgatgacagacgaaatcatggctccggctgcggcatattcaatcccgtacggcagaaacaccgtcgtgcagactgcgacaagtgaaatccgcacgatctgctcaagtacttgggaaaacgccagcgggttcatattctgcctgccctgaaagtaaccgcgcagcacgctggagatcgcgataatcggcacgacgggcgtaatcgccagaagcgggtaaaccgtgcgctgatccgtcagcatcgtttcggacataatcggcgcaaagcataaaaacagcggcgtgaagatgagacttaatatcccggtgacggtaagcgacatcactaaaatgtgtttcattttctgcctgtccccccgcgcgcttgcttcagcgacaagtttgctgatggcaacggggaggccgaattgagtcaaagtggtggccaagaaaaatgtcggggcagccatcatgtataaaccgaccccttcttcaccgataaaccgggcgataaccacccggttgacaaagccgagcattctcgtaatcatcccggctgcgatgagaataagagtgccccttaaaaaagtctgttttgccattttataaacccctgccttctcaaactacctggaatcatatacaataaagatatgcgccgatgtcgtccgagcatgacaagtcttcgagaaaaatggaaaaaggagcgagcgcccagtggagaaacatcccgccgaaatgtacaaagatcatttgcggcctttcttgtacagtaaacttgaagagttcaaaatcctcggatacgatgatgttgagcacgagagtttatggtcatacttaatacataaaaagtggaaacagaaaaaggaactgccgctgcatgaattggccggtcatattttatcagttaaaattggcgattttatgaactatgcaaccgttgaagcttttaagtcgtctaattggctggaaagcgatgagggtcaggaagctttagatgaactgctgagataatgatttgacggcataggtttaaggaggaaatacataatgaaaaaaggacgcttgattgcgtttttcctgatcgtattattgatcggcacagggctggggtattttacaaaaccggctgccaataatattacgttaggattggatttacgcggcgggtttgaagttctgtacgatgtgcagcccgtcaaaaaaggcgataaaatcacaaaagacgtgctcgtcagcacggtgcaggcgctgaaccgccgggctaacgttctcggcgtaagcgagccgaacattcagattgaaggaaataaccgcatccgcgtacagctggcgggcgtcacgaatcagaacagggcgcgcgaaattctgtcaacggaagcgcagctctcgttcagggatacgaatgataaagagttgttaaacggctctgatcttgtggaaaacggcgcgaagcaaacctttgatccgacgacgaacgaaccgattgtcagcgttaagctgaaggatgcggataagttcggagaagtgacgaaaaaagtcaagaaaatggcgcctaataatcagcttgtgatctggcttgattaccaaaaaggcgattcatttaaaaaagaagtcggcaaaaaacatccgaaatatgtatccgctccgaatgtgagccaggaattaaacacgaaggatgtcacgattgaaggtcagttcaccgttcaaaaagcgaaggacttggccaatattttaaacgcgggcgcgctgcctgtgaaactgaccgaaaaatactctacttcagtaggggcgcaattcggacagcaggctttgcatgatacggtagaggccggcatcatcggtattgcaattgttttcttatttatgctgctttattacagactgcctggactcatagcggtaattacgctttctgtatacgtatatattacgcttcaagtgtttgactggatgcaggcggtgctgacgcttccgggtattgcggcgctcattttgggtgtcgggatggcggttgacgccaacatcatcacctatgaacggataaaagaagaactgaaactcggcaaatccgtccgctcagctttccgttcagggaacagacggtcattcgcgacgattttcgatgcgaacattacaacgatcatcgcagcggtcgtgctctttattttcgggacaagctctgtaaaagggtttgcgacgatgctgattctgtcaattctgacaagctttattacagctgtcttcctttcaagattcctgctctcccttctcgtggaaagcagatggcttgaccggaaaaaaagctggttcggcgtcaagaaaaaacatattatggacattcaaaagacctacgaaaatactgaaccgcatacggcattccaaaaatgggatttcacgagcaagcgaaaatatttctttattttctcaagcgctgtaaccattgcgggaattatcatcttgctggtctttaagctcaacctgggaatcgattttgcaagcggcgcgcggattgacgtgcagagcaatcatgcattgacggcgcagcaggttgaaaaggactttgactctctcggcatggatccggaaaacatcgtgctctcgggtaaagagaaccatgttgccgcggcccggtttgtcggagagccatctaaagaaaaaatcgctgaaatcaaaacgtactttaaggacaaatacggatctgaaccgaacgtcagcacggtatcgccgacagtcggaaaagaactggctcgtaatgctttatatgctgtcgccattgcatcaatcggcatcattatttacgtatcaatacgtttcgagtacagaatggctgtcgccgcaattgtatccctgctgtatgacgctttctttatcatcgcgtttttcagcattacaaggctggaggtcgatgtcacctttatcgccgctattctcaccataatcggttactcgataaatgatacgatcgttacatttgaccggatacgcgagcagatgaaaaaacgcaagccgaagtcatttgccgatctggaacatatcgtgaatctgagcttgcagcaaacctttacacgttcgatcaatacggtcttgaccgttgtgattgttgtcgtcgtgctgctcattttgggctcatcgtcaattacaaacttctccgtcgctttattggtcggtttattgacgggcgtttattcctctctttacatcgccgcgcagctgtggcttgtatggaaaggtaaagaatttaaagggaaaaaatcaatcgaagagtaaagtgggaacaggctgtcttgcagaaggcagcctgtttttttaggccgcattgaacttaaaacctgcatttgctataatgacatacgcttacataatcaatcatcattgtaaaaacatgtaggagggttcttatgaacgttcgtgagtcggagcttccgggcatcggccagaaagtagaagtcattacgaaaaatcacgataaaatcagtattattcttcatgatgacggcagaaaagagctctattacttcgatgagaatgatcatgacgaatgcctggcatccgttgaatttaacgacgaagaggcgaggcagatttccgctattttaggcgggatgacgtataagccgaaagcgctggaatctgtggaagttgcgcttgatgacctcgtcattgagtggtttaaagccgaatctcatgcaccggctatcagccgtacaatcggagatttggagatcaagaaacattacaacgtccagattattgcgatcgtaaagaaaaaccggcaaaaacagctgagccccggcattgataccgtaattgaagcaggggacaccctcgtcatatcgggtgaaagaagcggactgaaaaagctggtccgcgagcagttaacggcccggatttcctgagaccggggtttactcccgggaaaatgggggaaaagataagaatgaacaattgggggcagacgcatgaataaacaatggactattatattcgctttactatttactttgattgtcgccatctttgctgtcattaacgtgcgggcggttgaggttgattatctgttcggaaccgctgaatggccgctgattttagtcattttaggctctgtgttaatgggagcgctgatcgtgttttcggccggtatctttcaagtgatgaaactgaagcgcgaaattaaaatgctgcggaaagaaaacagatccgaggctgaattgacgactgaatcggacggccaaaaaacagccgcgccgccggaagaaatgcttgaagagaaaaaaggatcagaataacatttgaaacccctcagtccgctctagtataatagggtggttgaggggtgaatttatgttagcgtcaaaaatgcgctgggaaatccagcagccggatcaggaaaaagtcaaatcactcacagaacaattggacataacacctcttgtggcatcactgcttgtaaaaagaggttttgatactgccgaaagcgcaaggctgtttttacatacaaaggatgcagacttttatgacccgtatgaattaaagggaatgcgggaagcagttgatcggataaaactggcggtttctcaaggggaaccgattatgatttacggagattacgatgcagacggcgttacaagcacgtcggtgatgctgacggcactcagacagctgtcggcggacgttgacttttatattcccgaccgtttcacagaaggctacggcccgaatgaacaagctttccgctccataaaagagcggggattttcgctgatcattacagtggatacgggaatcgccgccgtccatgaagctgaagttgcaaaagagctgggcttagacgtcattattaccgaccaccatgagccgggacccgagcttcctgacgtatttgcgatcatccacccgaagcagccgggctgcggctatccgtttaaagaattggccggcgtcggtgtggcgtttaagcttgcccacgcgcttacgggttctttgccggaagctatgctggacttggcggcaatcggtacggttgcagatctggtgcctcttcatgatgaaaacagattaattgcgtcactcggaatcaaaaggcttaggacgacaaatcggccgggcctcaaagccctgattaagctttccggcggagatatcggacaagctgatgaggaaacgatcggatttcaggtcgcgccgaggctcaatgccgtcggaagaatagaacaggccgatcccgccgtccatctgctgatgaccgaagatcagtttgaagcggaggaactggcttcggatattgaccggctgaataaagagcggcagaaaatggtgaaaaccatgaccgaagaggctgttgaaatggttcagcagcaaggcggaaacccgtctgccattgtagtggcaaaagccggctggaatccgggagtcgtcggtattgtcgcatcgaagctggctgaacgtttttaccggcccgctgttgtgcttgggatagatgaggagcagggaatcgctaaagggtcggcgcgaagcatcagaggcttcaacctgtttacgagcctttcacagtgcagagacattcttcctcatttcggcgggcatccgatggcggcaggaatgacgttgaaggctgaagatgtggcggaattaagggacaggctgaatcaaatggctgaagaaacccttacggaagaggattttattcccgttcaggaggttgatcttgtctgcggcgtagaagacataaccgttgaaagcattacagaattaaatatgctgtcgccgttcggcatgcttaaccctaaaccgcatgtgatggtgaaaaatgccgtgcttgatgatgtgcgcctgatcggagcgaataaaaaccacgtgaaaatgacagtgaaaagtgattccgccgtccttgactgcgtcggctttaacaaaggagagcttgaagccggagttgtccccggatcaacgatttccattgtcggcgagatgtccattaatgaatggaataacagaaagaagccccagctgatgattaaagacgctgcggtgccggaatggcagctttttgatatcaggggcaagcggacgtgggaagacacggtcaccgcgctgccgaaggaaaaacgggtgctcatcagctttaacgaaaaaaccgctcagaagctccgtgcaaaagagctgtcgggcgagctggccgggatcacatcggaatccgaggcggaagctctccagcttgacggaaaatatgccgtttttctggatgtgccgccgtcagcggatcacctgcagcatttgcttgacggaaagaagctggaacggatttattttgtttttatcaatcatgaagaacatttcctgtcctcatttccatctcggaatgatttcaagtggttttacgcatttctcttgaaaaggggcgcttttgacttcggcaagcatggttcagagcttgcgagacacagaggatggtcaattgacacaatcaatttcatgacaaaggtgttttttgatctcggttttgttaaaatagaagatggtgtgctgtctgtcgtgagcggcgcgaaaaaacgcgacctggcagattcgcaaacctatcaggtaaaacagcagctgatggaattagaccagaagctcaattattccgcagcccatgagctgaaggaatggctaaataagctgatgaaccaaggttcagaagcttatgaaagtacgaggaggacatagaacagatggatcttaaaaaatacgtaacaattgtgcccgattacccgaaagaaggcgtacaatttaaagatattacgacattgatggacaaaggcgacgtataccgctacgccactgaccaaattgttgaatatgcaaaagaaaaagaaattgatttagttgtcgggcctgaagcgcgcggctttattatcggctgtccggttgcatacgctctcggagtcggctttgcgccggttcggaaagaaggaaaacttccgcgtgaggtcattaaagtcgattacggtttggagtacggaaaagacgtactgacgattcataaagatgcgattctgccgggacagcgcgtgctgattactgatgacttgcttgcaacaggcggcacgatcgaagcaacaattaagctggtcgaagaactgggcggcgtcgtagccggtattgcgttcttaatcgagctttcttaccttgacggcagagacaagcttgacgattacgatattttaacattaatgaaatattaaccgcatatggaaaaaagcactcgtgtcagggtgcttttttcctattatttcatcatcctgacagattctttaggtgttttgaacttctgccctttacatctctcgtttttttcttgataataaactaatacagtttacatttaaaaaaggtgattccatggcgaacgaacaagtattgactgccgagcaagtaatagataaagcgcgcacttatctgccggaggagcagattgcgtttgttgagaaagcttacctgtatgcgcaaaacgcgcatcgcgaacagtaccgcaaatcaggtgagccgtacatcattcatccgattcaggtggcggggatcctcgtcgatctggaaatggacccttccacgattgcgggcggatttctgcatgacgtggtagaggacacggatgtcaccctcgacgacctgaaggaagcattttctgaagaagtggcgatgcttgtcgacggcgtgacgaagctcggtaaaattaagtataaatctcaagaggagcagcaggcggaaaaccatcgaaaaatgtttgtcgctatggctcaggatatcagagtcatattgatcaagctggcggatcgccttcacaatatgcggacgttaaagcatcttccgcaggaaaagcagcggagaatttcaaatgagacgctggaaattttcgctccgctggcccatcggctcgggatttctaaaatcaaatgggagctggaagacaccgctctccgttatttgaatcctcagcaatattacagaatcgtcaacctcatgaagaaaaagcgcgcggaacgcgaactttatgtcgaagaggttgtcaatgaagtgaaaaaacgggtcgaagaagtaaatatcaaagcggacttctcaggacgtccgaagcacatctacagcatttaccgcaagatggcgctgcaaaataaacagttcaatgaaatatatgatctgctcgccgtccgtattcttgtcggaagcattaaagactgctacgccgtactcggcattattcatacgtgctggaagccgatgccgggcagattcaaagattatattgcaatgcctaagccgaatatgtatcagtcactgcatacgaccgtaatcgggcctaaaggcgatccgctggaagtgcagatcagaacgtttgagatgcatgagatcgctgaatacggggtggccgcacactgggcatataaagaaggcaaggctgcaaacgaagaagcgacatttgagaaaaaactgtcctggttccgtgaaattctggaattccaaaacgagtctaccgatgcggaagaatttatggaatcgctgaaaatcgatctgttttctgacatggtatacgtatttacgccaaaaggcgatgtcattgaactgccgtcaggctctgtgccgattgatttttcctacaggatccactcggagatcggcaacaaaacaatcggggcgaaagtgaacggaaaaatggtgacgcttgaccataagctccggacgggcgacatcgtcgagattctgacgtccaagcattcatacggtccgagtcaagactgggttaaactggcgcagacgtctcaggcgaaacacaaaatccgccaattctttaagaaacagcgccgtgaagaaaacgtcgaaaaaggccgtgagcttgtcgagaaagaaattaaaaatcttgattttgaagtgaaagatgttttaacactcgaaaatcttcaaaaagttgccgacaagttcaatttctcaaatgaagaggatatgtacgcggcggtcgggtataacggcattaccgctcttcaggtggccaacaggctcaccgaaaaagaacggaagctgcgtgaccaggaagagcaggaaaaaatcgttcaggaagtcacttccgagccgaaacattatccgcaagggagaaaacgggaagcgggtgtgcgcgtaaaaggcattgacaaccttctcgtccgcttgtcgaaatgctgcaacccggtgcctggcgaccatattgtcggttttattacaaaagggcgcggtgtatccgttcaccgggatgactgtccgaatgtcaaaacgaatgaagcgcaggaacgtctgatccccgttgaatgggagcatgaatcacaggttcaaagacgcaaagaatataacgttgagattgagattttggggtatgaccgtctcgggcttttaaatgaggtgctccaagccgtaaatgaaacgaaaaccaacatctcctctgtctccggcaaatccgaccgcaataaagtcgctacgattcatatggcgatttttattcaaaacatcaatcatctgcacaaagtggtcgagcggattaagcagatcagagacatctattcagtccggcgggtaatgaactaaaaggagcttgctatgaaattagttgttcagcgtgtaacagaagcaagtgtgacggttgacggcgctgtcgccggccggatcggacccggcattatggcgcttgtcggcatcactcatgaagatacagaagaagatgccgcttacttggcggataaaatcgtgaatcttcggatttttgatgatgaaagcggtaagatgaatttatcgcttttggatacgggcggggagattttatccgtttcccagtttacgctttacggcgaaacgaagaaagggagacgcccgaattttatgaatgcggctaaaccggatcaggctgtgctcctttatgaaaagtggaacgaactccttcgggaaaaaggagtcaaagtggaaaccggaatattcggagccatgatggatgttcagctgacgaattccgggccgattacattgattatggattctaaacaataaaaaagctgccgttcggcagcttttttttatgattgaaaataatgttccaatccgctttcaattccgtctgtcactttttcctgataagagccgctatgtatgattgtttcttcctgcggttgactgagatagccgagctcatacagcatggcaggccgtttattttccctcaggacgtaataatcgccaaacagaacgccgcgatccgggatagaggaacgcttcactacttcagaatggacgtctgaggcaagctggcgatccttagacggactgtaataataagctgtgcttccccgtgttgacgtatcggcatagctgtcatagtgaatgctgataaaggcatccgcattccggtaatgagaggttgaaaccctggcctgcaggctgataaaagtatcatcctgtctggtgatatacacgtttgcaccggccgcccgcaatttttgggccagcagcttagcggttttaatggttacgtttttttcaaactttccggagtagccgatcgttccgctgtcttttcctccgtgtccgggatcaacgacgatcgtcttgtttttaagtgagccgctgccgcctgacgtgtcgggagaaggtgcttcacctgtttcctcaccgctttttgacgtttgtacaacccagtttgccacatatgcggtttgtccgttttcaagccggacttcataccatttgccgcttgagccgacaatcgggtaggctgcgcctttatctgctctttttacgatagaagcggaagtcgaggccgagctccttaagttggtgccgccgtaaacaatatacgcttttttcgaggagcctgagcccgcagaaccgtctcccgagccggatgcgctgtccgatgagtcagaatcctttatgatgtagtggcttgctgcccagcctttttgcccgtttgcttcaattttcagccagccgtggtcttcacttaagatggaaacctttgttccgcgtgataatttagtcataatcgctgaatcatgtgatgctgcacttctgacattcaatgaagaaacgccgaccgtcccgttttttgacccgcttcgggccgaagtggctttcgtatccgatcctccgctgtccgcggtgacgtattcggaagaaacccatccggttgtgccttgataagaaatgttcacccatccgctgttcttgtccagcaaggatgcatgtgcgccttgcggaagtttgccgatgacttcatatgatgtccccgggccttttctgatgcggaggtcaggatcggtggaagtgaccgttccgcttgttgcggatgaatggtctgctcccccggctgtttttgatatcagccaggaaacgacccatccggttttaccggggctcagctgaagctgcacccagtctccctcttctttagcgatcgggtatctttcccctttttttacttcagccttaattccatagctcaggccgggaccgcctctgacattgatcttgtctgtcgcgatgaccgcttctccctctgcggcgattgcggtgtggaatgacggaagaagcgctgtgatgatgacgccgcataaaataagagcaagagttctcttcttcatggctgtcctcctttctgaactaactaaaatacattcttgtataatatcgtattttccttgctgaatgttaaataaaaataaaatggtttgtttatactagtcataaatacagcgaaaaggtgtgcaaatcatgaaatatcaaccaaaaatgggacgcgcgctgcacgatgcggaaggaaatctgcacttcagtgatcagagcgatagcgaaaaggcgggttttcttgaagagacggcgacggagttcggtctcttatcgaaagaagcggtcgcaaggaaaaacagacggaataaaacttgacaggggagtgcaatcccattattataatagaaattgatgtacataagtcatgataacgattttgaaccgataatggagaagagtaggtcagaatgcatggagaagagaggaaccgtcccgggctgaaagcggatccgcactgcatctttctcgaaacaacactccggaggttccctgctgaacgcttttgcaagtcattaggcagcggacgtgaacctgcgttaaaggtcagagcggggatgcttcggcattccaactagggtggcaccacgggtataactctcgtccctactatacatgtatagtaggagcgggagtttttttatttgaagaaagacattaaggaggcctgtaacatggcatatcacattccaagaggcacacaggacatactgccgggtgaatcagacagatggcagttcgtcgaacaaattatgagggagacgtgccgcacttatcaatataaagaaatccgcacgccgattttcgagcatacggaattgttcgcaagaggcgtcggtgagtctacagatatcgtgcagaaagaaatgtacacgtttgaagaccgtaaagggagaagcctgacgcttcggccggaaggaacagccgctgcagtccgcgcgttcaatgaaaataaattatttgcgaacccggtgcagccgacgaagctttattatgtcggaccgatgttccgttacgaacgtccgcagacggggcgtttccggcaattctatcaattcggaatcgaagcgatcggctccaaagatccggccgtggatgcagaagtcattgcgcttgcgatgagtatttaccgcacagccggtttgaaacatgtcaagcttgtgttaaacagccttggtgaccaggacagccgcaaatcctaccgggaagcgctcgtcaaacattttgaaccgcgcatcggagagttttgctcagactgccagtcgcgtctgcacacaaacccgctcagaattcttgactgcaagaaagacagagagcatgaactgatgaaaacggctccgtccattcttgattacttaaatgaagaatcagccgcttattttgagaaagtaaaacaatacttaaacgatctcggcatcccgttcgaaatagatccgaaccttgtcagagggcttgattattataaccataccgcttttgaaattatgagcaatgccgaaggattcggagcgattacaacccttgccggcgggggccgctatgacgggcttgttgaacagatcggcggacctgaggcgccgggtatcggatttgcgatgagcatcgaacgtctgctggcagccattgacgctgagaaaacagagcttcccgtcaatcaggggattgactgctacatcgtgacgctcggagaaaaagcgaaggattattccgtttccctcgtgtacaaactgagagaagcgggcatctcaagtgaaatcgattatgaaaataaaaagatgaagggccaatttaaaacagctgaccgtctcggcgcacgttttattgcgattttaggggaagatgagcttgcccaaaataaaatcaatgtaaaagacgcggaaacaggagagcagcgtgaagtggtgttagacgagctgatacaagtgttaaaggcagatcaaaagcagtgaaggagaggaacgctatgtttggaagaacatattattgtggcgaaataactgaaaaagcgattggcgaaaccgtcaaactgaaagggtgggtgcagaaacggcgcgatctcggcggcttgattttcattgatttgcgcgaccgctcgggtattgtgcaagtcgtgttcaaccctgacgtatcgaaggaagcccttgccgcagcggaagcaatcagaaacgaatatgtgcttgatatcgaaggcacggtttctgcccgtgaagaaggcacgttgaatcccaacctgaaaaccggtaaaattgaaatcaaagctgaagcggtgacggtgctcagtacggcgaaaacgcctccgtttccgatcagtgaccaggcggctgacgtttctgaagacgtccggttaaaacaccgctatttggatttgcgccgcccggcgatgtttcaaacattgcaaatgcgtcaccaagtcacaaaatccatccgccatttcttggatgaaaacggatttcttgatattgaaacaccgattttaacaaaaagctctcccgaaggcgcccgtgattacttagtgccgagccgggtgcatgaaggagaattttacgcccttccgcaatcgccgcagatttttaaacagcttctgatggtgtcgggctttgaacggtattatcaagtggcccgctgcttccgcgatgaagacttgcgtgccgaccgccagccggaatttacgcagattgatatcgaaatgtcctttatgagtcaagaggacatcatggctctggcggaagagatgatggcgaaagtcatgcttgaaacaaaaggtgttgaagtaccgcttccgcttccgcgaatgacatatgaagaagcgatgaacagctacggttccgacaagcctgacacccgcttcggcatgctgctgacggacgtgtcagacatagtgaaagatactgaatttaaggtgttctcatcagccgtggcaaacggcggcgttgtaaaagcgatcaatgtcaaaggcgctgccggcgactattccagaaaagatatcgatgcgctcggcgtttttgccggaaattacggcgcgaaaggtctcgcttgggtgaaagttgaagctgacggcgtaaaaggcccgattgcgaaattctttgatgaagagaagcaggcaaaactggctgaagcacttgatgcttctgaaggcgatctgctcctgttcggcgctgataagtttgaggttgtggctcaatccttcggcgcgcttcgcttaaagctcggcaaagaacgcggcctgattgacgaaagcctcttcaacttcctgtgggttgtggactggccgttactggagcatgacgaggaagaaggccgtttctatgcggctcaccacccgtttacaatgcctgtccgtgaagatcttgacctgattgaaacggcgcctgaagatatgaaagcgcaggcttacgaccttgtcttaaacggctatgaactcggcggaggctcaatccgtatttttgaaaaagacgttcaggaaaaaatgttcgggcttctcggctttacaaaagaggaagcggaggaggagttcggataccttcttgaagcctttgaatacggcgcccctccgcacggcggaatcgcgctcggcttagaccggttggttatgcttcttgcaggccgcacaaacttaagagatacgatcgctttcccgaaaacggcaagcgcaagctgccttcttacggaagcgcccggcgaagtgagcgacgcccagcttgaagaacttcacctttctgtcaaaagaaaagtgaaacagtaaagatcagcagtttgtttcttgaaaatcaaaatctgctgtgatatgattttgacaagttaaataaagtcctgatgtgttagttgtacacctagttttgaccgaacatttttttgatttgggagcccgcatttttaaatggcgtacatgcctcttttcattcgttaagaggacttacaagatttaaaaaagggcacccacctgctgagagcgggttcaaaacgaaggaaagctgcaacggcacaattgggactttattttttgtgcgctaaaaccagcggctttttgacaagccgagtttataaaaccagaatgtggagtgaggttcttgttacatcagttttccagaaatgagctagcgattggaaaagaagggctggacacgttaaaaaacagcacggtggccgttctcggcgtcggcggagtcggttcattcgcagccgaagcattggcgaggtccggagtggggcggatcgtgcttgtcgataaagatgatgttgacattacaaacgtaaaccgccagctgcatgcgctcttgtcgacggtgggacagccgaaaacagacttgatgaaagcgcggatcgcggatattaatccggattgcgatgtcgtcgccttaaaaatgttttatacggaagagacgtatgagcagttctttgagcatccgctcgattacgtcattgacgcgtcggatacgattcattataaaattcatctgatgaaagaatgtctgaaacggaatgttccgctgatttcaagcatgggagcggcgaataaaacagacccgacacgctttcagattgctgatatttcaaaaacccataccgatccgattgccaaagttgtccgcacaaggcttcgtaaagagggcattaaaaaaggcgtacaggtcattttttctgatgaaagcccgatcgtcatccgtgaagacgtcagaaaagaagtcgggaatgatgaagcgaaaatccgaaaagcgcaaatgccgccgtcttccaacgcctgggttccgtcagtggccggtctgattatgggcggacatgttgtcatggagctcttaaaggacatcgacattaaacgggttaaagataaataaaaagaaaaacagccttcttcaggaaaggctgtttttttatttgaatccgccgtttacacgaaaggttttggccggtatcaaaaaagacaagaacacatagggtgtccttggtccggttattttttctgcttcatcagtttttcatacacttgctttatggcggcttcaaatttccccgtttgtttcggtttatagtattgcttgttttttaacggatcaggcaaatattgctgttcgacccatccgttctcgaaatcatgtggatattgatagccgatcccgcgtccgagctcttgggcccctttatagtgggcgtcttttaaatgtttcggcacatcgccgattttacccgtcctgatgtctttgagcgcctcatcaacggctgagatggcggagtttgattttggcgagaggcataattcgattaccgcattggccagcggaattctcgcttccggaaagccgatccgttctgcggtctgaatcgcgctcagcacccgggggcctgcctgcgggcttgcgaggccgatatcttcataggcgatcacgagaagccttcttgatatgctttcaaggtcgccggcttcgatcagacgggccagataatgaagggcggcgtttgcgtccgagcctcggatcgatttttggaaggcggataagacgtcataatgcgcatcgccgtttttatcatgagtatagctttttttctgcagacattcttccgccgtctcccgtgtaatccggatcgtgccgtcgcttgattcctttgtggagagcacggcaagctccagtgcgttcaaagcggagcggacgtctcctccgcacccttgcgcgaaatgatccatcgcgtcgtcgtccaccgaaacgctgtaggaaccgagtccccggtgttcatctgtgagcgctctttccaatgcctgcttgatcagatcgggtgttaacggttcaagctcgaagatctgggtccggcttctgatggccgggttaatggcatgataagggttggcggtcgtcgcgccgattaaaataatcatgccgttttctaaatagggcagcagaaaatcctgctttcccttatcaagcctgtgcacttcgtcaaggattaaaatgacctggcctgacattttcgcttcctgtacgacaatctccatgtcttttttattatgaatgacggcattcaatttcctgaatgcgatgcttgtcgatcctgcgatcgctgtggcgatggacgtttttccgatgcccggcggcccgtacaggatcatggatgataagtgctttgcacgcaccattctgccgatgattttatcttctttgaccaaatgttcctggccgataatgtcttcgatattggcaggccgcatccgatacgccaatggtttcatgaacatctctccttacatatacagggtaacggaaaacggacgattagaaaagcgaattgcggcgggccccgtgtttcaatgaaaattaggataagttatgttataataacagttggtctataagatactaaacagattattcatatccatttacttgtataaattaacaattagaattgactggggtgttcatattgaaaatatcgacaaagggaagatacgggctcaccattatgattgaattggcgaaaaagcacggagacggtccgacgtcgctcaaaagcatcgcccaaacaaacagcctttctgagcattacttggaacagcttgtatcaccgctcagaaacgccggactcgtaaaaagcatcagaggcgcttacggggggtacgtactcgggggccagcctgaagagataacggccggagatattatcagagtgctggaagggccgatcagcccggtagaagtgcttgaggatgaagagcctgccaagcgggagttatggatccgcatccgcgacgctgtaaaagacgtgctggacagcacgacgttagaagaccttgcgagctacacggacggcgagcaggaagcttatatgttctatatttaaaccagaggtgtacagacaatggaacggatttatttagatcatgccgcgacttccccgatggatgagcgtgtgctcgaagagatgaagccccatttcttcggcagtttcggcaacccgtcaagcattcattcattcgggagagaatcccggaaatgggtcgatgaagcgagagcggacatcgcgcgcgaaatcagtgcgaaagaacaggaaattattttcacaagcggcggcacggaggctgataatttagcgattttcggaacggctgccgcccggaagaatgaaggaaagcatatcattacgaccgctgttgagcatcatgctgtattgcacgcctgcgaaaagctggaagaagacggctttgaggtgacatacctcatccccggcccttcaggacagatcagtgcaaatcaggtgaaagaagcgctccgtgatgatacaatccttgttaccgtcatgtatggcaataacgaagtcggaaccattcagccgattgacgaaatcggagagctgttaagcgggcatcaggcctattttcacacagatgccgtccaggcattcggttatatgccgattgacgtgaaaaaaagcagaattgacatgctgtctgtttccggtcacaagcttaacggacctaaagggacaggctttttatatgtaaatcaagaggtgaagctgtcaccgattcttctcgggggagagcaggaacgaaagcgccgcgcggggacggaaaatgtaccgggcatcgccggcttaaaagaagcggtcgtcctttcaaaccgtgagagggaagagaaaacagcgaagtataaggagtttaagaatattatcatgagcacgctggaaaaatccggcgtcacagcggaggtgaacggagatgccgagaaatgcctgcctcatattttaaacctttactttcccggtgtgccggtggaagcgctgctggtcaatcttgacatggaaggcgttgccgtctccagcggatctgcttgtacggcaggatccgttcttccgtcccatgtgcttacagccatgttcggaagtgagagcggcaggctgacttcgtcaatccgcctcagcttcggcctcggcaatacggcggaacaaatcgaaacagccgccgaaaagcttgccgccgtcgttaaacggcttgcttaaaacggcggacttacgtttttaatggagtgaatgcaaatggaaaaacggccggaggatacaagagtcgtagtcggcatgtccggcggcgtggactcttccgtggcggcccttctgctgaaggagcagggctacgatgtaatcggaatctttatgaaaaactgggatgatacggacgaaaacggtttttgcacggcgacggaagattatgaagacgtcatccgggtctgcaaccagatcggaattccgtattatgccgtcaattttgagaagcaatattgggaaaaggtatttcaatatttccttgatgaatataaagccggaagaacccccaatccggatgtcatgtgcaataaagaaattaagtttaaggctttcttggatcatgctctgtcactcggcgcggattatcttgcgacgggccattacgcccgcgtggacagaagcgcaggtacagtgcgcatgctccgcggtctggacgaaaacaaggaccagacttattttctgaatcagctcaatcaggaacagctcagcaaagtcatgttcccgatcggtgatctgcaaaaaagccgcgtgcgggaaatcgccaaagaagcggaacttgcgacagctgcgaaaaaagacagcacgggaatctgctttatcggcgaacgcaacttcaaaacgtttctcagccaatatctccccgctcagccgggcgatatgatgacaatggacggagaagtaaaagggcgtcatgacggtctgatgtattatactatcggacagcgccacggtcttggaatcggcggaagcggcgagccgtggttcgccgtcggtaaagatcttgaaaaaaacattctgtatgttgatcaaggattccataatccgcttctgtattctgacaagatcacggcgacaaatgtcagctggacgcgtcccgttctgatggacggcggcgaaatgacatgcacggcgaaattccgctaccgtcaggaagatcacaaagtaacggtgaaaatgacgggtgatgatgaagcggaagtcatttttgacgggcaggtacgcgccgttacgccgggacaagccgtcgttttttatgacggagaagagtgcctcggcggcggaacgatagatgacgtttataaagacggaacaaaactgtggtacgtataacacatgtaaaaaacctcaactcgcatgttggggttttttagcgaaaggaagttaaaaatggattataataaaatcgggattgacgccatgcaggagggcgattttgaaaaagcggcagaggcttttacgaaagcgattgaggaaaacggccaagatccggtgccgtatatcaacttcgcaaatctgctttcttctgtgaacgaactcgaacgggcgcttgcattctataacagagcgcttgaattggacaattcggcggcagccgcttattacggtgcgggaaacgtatatgtgatgaaagaatcgttttccgaagcgaaggatatgtttgaaaaagcgcttcgctccggaatggaaaacggagatttgttttatatgctggggaccgttctcgttaaattagagcggccgaagcttgcactgccatatttgcagcgtgccgttgaattaaatgaaaatgacacggaagcacgcttccagttcggaatgtgcctcgcaaacgaagaaatgctggatgaagctctggcgcagtttgagacggtgatcgagcaggacccaagccacgcggacgcattttataatgccggggtcgcttacgcgtacaaagaaaatcgtgaaaaggcgcttgagatgctggaaggcgcaatcggcatacagcctgatcatatgcttgcgcttcatgcgaaacagcttatcacccagtcataacaaaaggagggaaggctcgtggatcagctgaacatcgaagaacagccgtatgtaaaaggcgtcattcatacggtcatttatcataatgacaccaacctgtatacagtgctgaaagtcaaggttgcagaaacgtctgaggcgatcgaagacaaggtcgtatccgtaacgggctacttccctctgctgcaagaagatgagacctacacattttacggaaaaaccgccacgcatcctaagttcggcctgcaatttcaggctgaacactttaaaaaagaaattccgaccacaaaagaagggatcattcactatttatcaagtgatctgtttgaaggaatcggaaaaaaaacggcggaagaaatcgtcaaaaagctcggagacggcgcgctcaataaaattctgacggatgcatcggtgctttacgatgtgccgaaaatgtcgaaaaagaaagcggataagcttgccggagagctgcagcggcatcaggggcttgagcagattatgatctctctgaaccaatacggtttcgggccccagctatccatgaaaatatatcaggcctacgaaacggaaacactggagaaaattcaggaaaatccttatcagcttgtaaaagacgttgaaggcatcggctttgtgaaagctgacgagctgggcggaaaaatgggtctgtcaggaaaccacccggagcggatcaaagcggctatcttatatacaattgaatcgacctgtctttcagagggccatacgtacatagaaacaaagcagctgataatcaatacgcaaacgctcctgaatcagtcagctgaaggcggccgcgtcacggaaatggatgcggctgacggcatcatcgccctcggggagagtaaggatatcgtcatagaaggagaacgctgctattttccgtccttgtattacgccgaacaaaatgtcgcaaaacgcgtgctcgacattgcggctcaaacggagtatgccgatcaatttcctgaatcggaatttctgcttgcactcggtgaactggaagaacggatgaatgttcaatacgcgccaagccaaaaggatgccattcaaaaagcgctgtcttcaccgatgcttttactgaccggaggacccgggacggggaaaacgaccgttattaaaggaatcgtggaattatacagtgaactgcacggagtatcgcttgaccccggtgattataaaaaagacgagacgttcccggtgctgcttgccgcgccgacgggaagagccgcaaaacggatgagcgaatctacgggtctgccggctgttacgatacacaggctgctcggctggaatggcgctgaaggctttacctacaatgaagatcagccgatagaagggaaactgatcattatagacgaagcgagtatgctcgatatctggctcgccagccatttgtttaaggcgcttcctaagcacattcagctcattgtcgtcggtgatgaagaccagcttccttcagtaggaccggggcaggtgctcagagaccttttggcttctgaggtgctgccgaccgtgcgcctgacagatatttaccgtcaggctgaaggatcatccattgtggaacttgcgcatgatatgaaaaaaggactgcttccaaaggggctgaccgcgccgacaaaggaccgctcatttatccgctgtaattcttcacagattaaagaagtcgtagatcaggtcgtctcgaacgcgttaaaaaaggggtatacctccagggatattcaagtgctggccccgatgtacaggggaaaagcgggaattaacgagctgaatatgcttcttcaagacatcatgaatccgccgaaagaaaaaaggcgggagctgaaattcggtgatgtcgtctacaggacgggcgataaaatattacagcttgtcaaccagccggaaaacaatgtgtttaacggcgatatcggcgaaatcgtatccattttttatgccaaagaaaatacggaaaaagaagacatggtcgtcgtctcgtttgacggcaatgaaatcacctttacgaaaaaggatttcagccagtttacccacgcgtactgctgttccattcataagtcgcaggggagcgaattcccgattgtcgtcctgcctgtcgtcaaaggctactatcgaatgctcaggagaaatctgctttataccgccattacaagggcgaaaaaatttctgattctttgcggagaagaagaagcgcttgaatggggcgtcaaaaacaatgatgccaccgtcagacagacgtcgcttaaaaacaggctcacagagcagactgaagagatggatgcagaactggccgccctgcaaaaagagctgccgttcagtgtatatgatgcaaacatcggaatggaaggcatcacgccgtttgactttatggaagaaaaagcgtaataaaacccggagcataaacatgcgccgggttttcgcctgtggaagtcatttcaaagtatgctgcccggcttcttggcaaaacctatacgtgttcaacaaaaggtggttgatcacactttgagaacatgccatgcagctgaaggacgaacagtatatgacgaaaacaccgggtgcagtctcgggatgatatcggatgtatgtttctctctggacggccggtttctcggtttcgtgctggagcagaaacgcctgtttcacaaccgtcatctttttttagaggcaagtgatataaaagagatggatcaagaagccgtagctgccggtcatgctcatttgcagcctttgccgaagagctgtttcacctttgaacagattaagatgcagccggtgaaatcgcctgatggtgaaatgttcggtttgctggaagatgtatacttttgtttggacaggggcataatcgtagcatatgaactctcggacggcttcttttcagatctggccggcagacgccaagtgcgccgcgccgccgatacgcttattgaagcggggaaagaaggcatcgtcctgaacggataagaggtgtagtctgtgcttgtatgtccgaactgcaaaagtaaagatatcggcaaaatcggcgtaaaccaatactattgctggggctgcttcattgagctgacggtggccaaaggcaaaattgcgacacatcaagtagaggaagacggcacattaagcagtcttgatgatttgttttctgaagacgaacgcagtatcaatttttaaagttgaaaggagatacgcgcgatgggcagaacaatgacctctctgttggctttaggagctggagccgttatgtatcgtatggcttctcaatccgatatgctgaataaaaaaggtatgaaacggatgagaagacgagtcatgaaaatgttttaagcagaaaaaaggatacttctccggaagtatcctttttacgtttgtctcgcttccagccgtctggctgcgagagacaggctgtaattgaccgcgaaatacatcagggccgccagcagaaagatcgggaaaaaataccctccgtcagcgctttgtccgtttaagatctgcgcgttatgaatcagttcgggcagagcgatgacgaccgcaagtgacgtatcctttaataaagaaataaactggctcacaatcggaggaaccatacgcctgagcgcctgcggcatgacgacgagaaaaagagtctgcgtgtacgtcagtcctgaagaacgcgccgcttcaatctgtcctttgtcaacggattgcaaaccgcttctgatgatttctgacagcatggccgattcaaaaatcgtcagcgccgtaatggcggccgcggtaatttccagtttgatcccgatttccggaagggcaaaaaacgtaaagaaaatgattaataacagcggcaggttgcggatggtttccacaatggccgctataatgcccgagacgataggaattttcgcatagcgcaaagtgccggcggcaagcccgaaaataaaactcaggacaatggagatcagtgcaacataaagtgtgaccaaaaagccgtcccataaaaacagcagatggtcaggtgtataggcgccgctaaaatccatgtttttcactctccttctctaataactctttccgagacgtctttccaaatagtgaaccccgatgctgagcgggatcgttactatcaaataaaaaagcgcgacgaaaatatagacatcaaacacgacaagagtgcttgaggaaacgagatccgcctgatacatcaaatcgagtcccgccaccactccgagtattgatgagtttttgacaaggttgagaaattggtttccgagcgggggaatcacgatttttacggcctgaggaagaatgatatatctcatcgcctgactgtaggtgaagcctgacgatctggccgcttccatctgccctttggagacagtctgaattccggctctgatggcttctgcgataaaggcggatgtgtaaatcgtcagcgcaatcgttcccgcctgaaagccgtccagtctcagcccggcgttgggaagtccgaaataaaaaacgaatgtgatgaggagaagcgggatgttgcggataaattccacatacgcagtgccgatccattgaaggggtttgaaagccgtgattctcatgactgcgatcagaacgcccagcgcaaagctgcctgccagcgcgatgaagctcgcaagcaatgtgtgcaggaaaccgtccatatacatatcgaagttttccgttaaaattgaaaagttcatctatgtcactccttataaaacggggatgagcatgcctgctcatcccgcgatcctttctattttgccggttcttctttaatccattttttatagattttttcgtacctgccgtcggctttcatttttttcaaagaggcgttgatttccttgatgagtccggattggccttttttgacggcgattccgtaaggttcatcggtgaaggtttcgcctgtcagctgatattgtttattttcatctgccatgccgtataaaatcgcattatcggttgtgagcgcatctccctgtcccgctttaagcgcagtgaacgcttcggcgtaattttcaaattccagcactgaggcgtcaggcgctttttctctgatgttttgtgaggaagtagagccttttaccgccaatacttttgagccttttcccaggtctttggtgcttttgatgctgcttccttttttgacgagcagggattgcccggcttcaaaataaacatctgagaaatcaacttcttttttccgctcattcgttatcgtcatcgtggcggtgatagcgtcgatatcgccgttttgcagcatcggaattctcgtttttgacgttacttctttaaattccgctttcttctcatcccccagaatatcttttgcgagctgttttgagatatcaatatcgaagccttcaatatcaccggagcttgggtttttcagcccgaataacctcgtgtcggttttgacgccgaagatgattttgtctctgtctttaatagaggctaacgtgtcttttcccgttccttttgaatctccggacgtttctttccctccgcaggcggccagcataaagacggccagcagtgatatcaatccgaatgacagccattttgttacgcgtgacataagcgctcctccgtttcttttcagtgatttaaaatacggcttaagaataaacgcgccctctcttcacgggggctttcgtaaaattcagccggtgcagcttcttctaagatggctccgccgtcgataaacacgatgcggtccgccacttcttttgcgaatcccatttcatgtgtgacgactgccatggtcatgccttcctttgcgagtgttttcatgacatccagcacttccccgatcatttccggatcaagcgcagatgtgggttcatcaaacagcataatttcgggcttcatcgcaagccccctggcgatggcgacacgctgctgctggccgcccgaaagctgtgaaggataagcgtccgctttttccggtataccgacttttttcaaatagtataaggccgtttcttttgcttcttcttttgattgcttaagcactttgatcggtgcgagcatgatgttttgcagaacggttttgtgcgggtacagatgaaaatgctggaacaccatgccgatattgcggcggaccttatttatatccgttttcttgtcatggatggagacgccgtttaccgttaaggcgcctccatcaactgtttccagctgattaatgcagcggagaagcgtgctttttcccgatcctgaaggtccgatgataacgacgacttccccttttttaatgtgcagattaatgtttttcagcacgtggaaatgtccgtagtgcttatttacatcctgaaatgaaatcatggccatcctccttaaaaaacatgagtcattttgactggacagttttaaaaccctttaacacattacgatagttatacagatttttatgaatattatttagattatttcgtaatttctgataattgtttccgtcaagaggtctgcgtcataaggcggagtttatgaaacgggaataattccggctttctgtcaaaagataaagcaagaggtgaaacgtcatgcttcaaaaaccgctgcagctcttaatgtggacggctgtatgtctgctcgttttgttaacagtgtatgtcttttgcatgctcgatatgttatggtctcccatttggcttgttataaaatctctctttattcctatattcatcgcagtatttattgcttatcttttacttccgattactgaatggcttcataaaaaggggatgcctagaactttaagcctgcttctgatttattgcctgtttttcggcggaatcggctggggggtttataaaggggttcctgttttaattgaacagctgcaggatctgtctgagagcattcccggtcttgccaaaaactacaacagcatgctgaagcatctgcataatcacacggatcattggcctgacggcatgcaccatcgaatggacaaaatgattcagcagacagaaacgtttcttgccggcacgattgaaagcacgatcagaagcatccgtttcgtgcttgattatatcctgatcgcggcgacgattccttttctcgtgttctatatggtgaaggatatagacggcatgaaaaagacagtctggtatttgacgccgaagtcctggagaaaaagggggagtgaatttctgcgggatgtggacgactctctcggtgattacatccgcggtcagcttctcgtttgttttttgctcgggctaatagccggcgtttcattttggctgttcgggcttccttacccgctgattttgggccttgccatcggggttacgaatgtcatcccgtatttcggtccgtttatcggcgctgtgccggcgctgctcctttcgctggcgatttctgctaaagctgtgatcatcgtaatcgtcacgatttttattctgcaatttatagaaggaaacattttgagcccgcttattgtcgggcgcagtctcagaatgcaccccgtcgtgatcatgctggcgctccttgccggaggagagctcgcgggcatacccggcatgattctcgctgttccggcggcagccattttaaaagtgacggccatacactttttgcggatcaggacggaacattgacattcgggttctgcttgtctataatttcgagtagaatacatacgaatctcgagtgacggatatgagtacgccgaagccctgtttaagagagaagctccgatacgctgaaaggagcttcagcagaagatcggccgaagctaatcctgagtgcagttaaaggctgccgcagtcctgcgttacgggatgaaaggtgacaggcctttttcggcctgtaatcagggtggtaccgcgagacagctctcgtccctgtgtgaacgcatggtttgcatagggagagagcttttttgctgtcgcaaaagagaatttcgggtagtgataaggaggaatatagatgaaacacttaacttctgctgaagtgcgtcaaatgtttttagatttctttaaagaaaaaggccatgccgttgaaccgagcgcctcattggttccgcatgaagatccgtctttattatggatcaacagcggcgttgcgacgctgaaaaaatactttgacggccgcgttgtgccggagaatccgagaattgtaaacgcgcaaaaatcaatccgaacaaatgatattgaaaatgtggggaaaacggcgcgccaccacacgttctttgagatgctcggaaacttttccatcggtgattattttaaagaagaagcgatcacgtgggcatgggagtttttaacgagcgaaaagtggatcggctttgatccggagctgctgtctgtaacggttcaccctgaggatgaagaagcttatacgctatgggcggaaaaaatcggcgttccggaagaaagaatcatccgtctggaagggaacttctgggatatcggcgaaggcccgagcggaccgaatacggaaattttctatgaccgcggcgagaaatacggcaatgacccgtcagattctgaattgtatccgggcggcgaaaatgatcgttatcttgaagtatggaacctggtattctcagagttcaaccacaacccggacggcacgtacacaccgcttccgaagaaaaacattgatacgggcatggggcttgaacggatggtctccgtgattcaggatgtcccgacaaactttgacactgatttgtttatgccgattattgaagcaacagagcgcatttccggagatgcttacggaaaggatgcagtgaaggatacggcctttaaagtgatcgccgatcatatcagaacggtcgcatttgcggtaagcgacggggcgctgccttcgaacgaagggcgcgggtatgtactgagacgccttttgcgccgggcagtgcgatacgcgaaaaccatcggtatcagccgtccgtttatgtacgaactggtgccgactgttgcaggaattatggacgctttctatccggaggtgaaagaaaagcaagagtttatcgccaaagtcatcaaaacggaggaagagcgcttccacgaaacattaaacgaaggtctggccattttatccgacgtgataaagaaagagaaggaaaaaggcagcggcatcatctccggaaaagacgtattcaaactgtacgatacgtacggattcccggttgaattgacggaggaatacgcggaagatgagcaaatgacggttgaccataaaggctttgaagccgaaatggaaaaacagcgtgaacgggcgagaaatgcgcgccaagatgtaggaagcatgcaggttcagggcggcgcattgcgcgacattaccgcagaaagcacatttgtcggctacagtgccgtaaaagctgaagcgaaggtgatcgagcttcttcatgacgggcaattaatcagtgaggcgcatgaaggggataccgtccaaatccttcttgacaaaacgcctttctatgctgaaagcggcggacagatcggtgacagaggagtgctgagaagcgagcaggctgtcgtaaccattaaagacgtgaaaaaagctccgaacggtcagcatgtacacgaaggcacggtggctagcggcacgattcaaaaaggcgcaagcgtgacggctgaagttgaagatcaaatgagaagcggcgtggtgaaaaaccatacggctacccaccttctgcaccaggcgctgaaagacgttctcggcacacatgtcaaccaagcgggttcactcgttaccgaaaaccgtctgcgttttgacttctctcatttcggtcaagtgacgaaagaagaacttgaacgcattgaaggaatcgtcaacgaaaaaatctgggagagcattccggtagcgattgatttgaaaccgatcaatgaagcgaaagaaatgggcgcgatggccctgttcggcgagaaatacggcgatatcgtccgcgtcgtacaagtcggagattacagccttgagctttgcggcggatgccatgtcacgaatacggctgaaatcggcctgtttaaaatcgtatccgaatcagggatcggcgcagggacgcgaagaattgaagccgtaacaggaaaaggcgcttatcaggaaatgaacagccagctcagccttctgcagcacgctgcggacgagctgaaatcaaacgtaaaagacgtaccgaagcgaattcagtctcttcaagcggagctgaaggaagcgcaaagagaaaatgaatcattgctcagcaaactcggcaatgtggaagccggagccattctgtctaaagtaaaagacatcggcggcgtaaaagtgctggctgaaaaagtaaatgcgaaagacatgaaccaccttcgcactatggtggatgatctgaaagcgaagctcggttctgcggtcatcattctcggcgccgtgcaaaatgagaaagtcaacctttcagcaggcgtgacgaaagacctgattgaaaaaggtcttcatgccggcaaaatggtcaaacaagcggctgaagtctgcggaggcggaggcggaggccgtccggacatggcgcaggccggcggaaagcagcctgaaaaattggaagaggcgctcgcatctgcggaagattggataaaatccgttttataatcctttcaactagtgtagaatgatgataagatgaggacctcaggctgaactttgcctgcgaatttgggaaagaggtgcaaaacggtgagctcgtttgataaaacgatgaaatttaatttctccgatgactctgctgaaacaaacgtcgaagaagtgctgattacggtatatgatgcgcttcaggaaaaggggtacaatcctatcaaccagattgtcggatacttgctgtctggagaccctgcatacattcctaggcatcgcgacgcccggaacttaattcgcaaactggaacgtgacgaattaatcgaggaattggtaaaatcctatctagaacagcataaagaggcgtaaatacattcatgagaatattgggacttgatcttggaacgaaaacactcggcgtagctttaagcgatgaaatgggctggaccgctcaaggcattgagacgataaaaataaacgaggctgaaggagattacggtctggaccgtttatccgagctgatgaaagactataatgtagagaagatcgtgctcggttttccgaaaaacatgaacgggacgatcggtccgagaggcgaagccagccaaacatttgcgaaactgcttgaaacagcgtacaatgtccctgttgtgctgtgggacgagcgtctgacgacgatggcggctgaaaaaatgctgatcgcggctgacgtcagcaggcaaaaacgaaaaaaagtcattgataaaatggcggctgtcatgatccttcaaggatatctggacagtttaaactaagaggtgaaaaaaatggaacacggcgaaaaacacattacaattgtcgatgatcaaggcaacgaacagctttgcgaagtgctgttcacatttgaaaacgacacattcaacaaatcttacgtactttattatccgattgatgctcaagacgatgatgaaatcgaaattcacgcttcaagcttcgaaccgaacgaaaacggtgaagacggcgaattgatgccgattgaaaccgatgaagagtgggaaatgatcgaagaaacgctcaacacgtttttagcggaagaagacgaagaataaaatgaacggaaaaagccggagcgcatatgcgcttcggcttttttttgtaataaattgccgaatgcacatgaatcatgtagtataagagctgttgggaggaaaatacttgtatgaatatcaatcagactaaacattcatttccgcgtaaaaacaaaaaaacgacgataatactgtcctccgtgatcgctctgcttatcatcatttgcggtgcttttttctatggaaaatctctgctgtctccggttgacaaaggcagcaaaacggcagtcaatattaatattccgagcggttcttccgtttcggcaatcgctgaaattcttgaggatcagcatgtcatcaaaagcaaaaaagcatttcagctgtatgtgaagtataaaggcgcttccgggtttcaggcgggattttaccacctgaataaaggaatggatgcggatgcgattatcaaaaaactgaccgcgggatcaacgggatatgcttttcagatctccgttcctgaaggaaaacagcttacgcagattgcagaggcgatcgcaaaagaaacatcatattctaaagaagagatcatggcgaaactggatgacaaaacattcatcggcaaactgaagaaacagtttcctgatacgataacggacgcgctttcaaacaagaagctcaagcatccgctagaaggctatctgtatccggccacatatccgtttaatgatccggatgcatcgcttgacacgattttgacggcaatggttcaggaaacaaacgcccgtatcgaaacgtataaatctgaactggaaaaaaagaaactttccgttcataacgcgctgacaatggcatcgctaattgaagaagaagccaccgccaaagctgaccgtcacaaaatcgccagcgttttttacaacaggctcgaagaaaaaatgccgctgcagactgacccgacggtattatatgcggccggtaagcataaaagccgggtctactacaaagacctgaaaattgattctccgtttaatacgtataaacataaggggctgccgccgggaccgattgcaaatgccggtgattcatcatgggaagcggctctccgccctgacaaaacggattatctctatttccttgcaaaatcaaacggcgaggttgttttcaccaaaacattaaaagaccataataaagcgaaggaaaagtatatttccaaaaaagacagcgaataaaaggagggcaaaagctctccttttattccattctgaaaggttttatgataaaatatatcgggttgtttacttatggataaagaagtgtcttaagagagtgtccccgcggattcgtcaggggcactcctttttagaacggaggctgtttgccgtgaatgatcggtatgaacaaataaacgagtatataaacgcgatgctgaagcctcggcctgataaagtgaaaaagcttgaagcctatgcaaaagagcaccatgttccgattatggaagaagcgggcattgaagtgctgcttcaaatgctgtcgattcaacaggcgaaaaacattttggaaatcggcgcggcaatcggatattccgccatacggatggcgcttgagcttccgggtgcgaatatttacacgattgaacgggacgacaaacgctatgaagaagctgtgaacaatataaaagactttgaaatggaaaaccggattcacgtaatgcacggggatgcgctggaactttctgagtctgtccgtgtcacggctccttatgatgccatttttatcgacgcggccaaaggccagtacacgaacttttttgagctctatgaaccgatgcttgcgccggatggagtcatttttacggacaatgttctgtttaaagggctggtggcgcaaaatcactcggacattgagccgaaaagaagacggaagcttgttgaaaaaattgatcaatataaccaatggctgatgaaccggcctgactatcaaacggtcatactgccggtcggagacggcatcgccatcagtaaaaagaagaggtgaatgatcatgaaaaaacctgaacttttggtgactccgacttctgtacaggatattcttccgctcattcaagcgggcgcaacggccctgttagtcggagaacagagatacggcctgagactggccggtgaattttcaagagaagatataaaagaagccgtaaagacagctcatcaggaaggcgcgaaagtgtacgccgccgtcaatgctatttttcacaacgaaaaagtggacgagctgaacggctatcttgcctttttgcaggaggccggcgttgatgcggctgttttcggtgatccggccgttttaatggcggcgcgtgaagcggctcccgagcttaaactgcactggagcacggaaacaacgggaaccaactactactcctgcaattactggggacgcaaaggcgcacggcgggcagtgctggctaaggaattaaatatggacagcatcattgacataaaagaaaacgccgaagtggaaattgaaattcaaatccacggcatgacgtgcatgttccaatcgaagcgttctttagtgggccattactttgaataccagggtaaagtcatggacatcgaacagaagaaaaaagaagcggggatgtttctgcatgacaaagaacggggcaataaatacccgatttttgaagatgaaaacggcacgcacatcatgagcccgaacgatgtgtgcatgattgatgaattagaggacctgatggacgccggcatcgattctttcaaaatcgacggagttttgaagtctcctgaatacttaactgaagtgacccgcatgtacagagaagcaatcgatctgtgcttcgaaagccgggagacatacgaagagaaaaaagagagctggatagagcggattgaaagcattcagcctgtgaacagaagcatcgacacaggattcttctttaaagaaacggtctattaaaaaggagggtgcaacggatgacagccgtaaatcaaaccatttccaaagtcgtaaacggaaaacgcgtcattacgaaaaaacctgaactccttgctccggcaggaaaccttgaaaaattaaaaattgccgttcattacggagcggacgcggtttttatcggaggacaggaatacggactccgctcaaatgcggataacttctcaatagaagaaatcgcagagggcgtagaatttgctgaaaaatacggggcaaaaatatatgtgacaacaaacatttttgcccataatgaaaatatggacggtctggaagaatacttaaaagcgttgggagacgcaaaagttgccggaattatcgtcgctgatccgctgattattgaaacatgccggagagtggccccggacgtagaaattcacctcagtacacagcagtccctttccaactggaaagcggtgcagttctggaaagaagaagggcttgaccgcgtggtgcttgcccgtgaaacgagcggactggaaattaaagaaatgaaggaaaaggtggatattgaaattgaaacctttgtccacggcgccatgtgtatcgcttattcaggccgatgcgtgctgagcaatcacatgacggcccgggattccaaccgcggcggctgctgtcaatcctgccgctgggattatgacctgtatcagacagacggtgcaaacgcggtcgcgctctatgacgaagaagacgctccgtttgcgatgagcccgaaagatttaaaattaattgaatccattccgcaaatgatcgagatgggcatcgacagcctgaaaattgaaggccggatgaaatcgattcattacgttgcgacggttgtcagcgtgtatcgcaaagtcatcgacgcatactgcgctgatcctgaaaactttgtcattcaaaaagaatggctggatgagctggacaaatgtgcaaaccgggataccgcgcctgctttctttgaaggcacgcccgggtatgaagagcagatgttcggcgaacacggaaagaaaacaacatttgattttgccggtctcgtgctcgcgtataacgaggaaactcaaatggtgacgctccagcagcgcaatttctttaaacaaggtgacgaagtggaatttttcggtcctgaaatcgacaatttcacattcacaatcggcactatttgggacgaagacggaaacgagcttgatgctgcccgccatcccctgcaaatcgttacatttaaagtagacaaaaagatttatccgagcaacatgatgagaaaggggaagtaatcaccaatgggtaagagtcctgtagttataggcatcgcaggaggttccggatcaggaaaaacaagcgtcacccgttccatctatgaacagtttaaaggacactcgattttaatgatccagcaagacctttattataaagaccaaagccatcttccgtttgaagaaaggctgaacacaaactatgatcacccgctcgcatttgataatgactatttaatcgagcatattcaggagcttttgaattaccggccgatagaaaagccgatttatgattataaactgcatacgcgttctgaggaaaccattccggttgagccgaaggatgtcattattctggaaggcattctcgttctcgaagataaaagacttcgcgacctcatggatatgaaactttatgtcgacacggacgcggatctccgtatcatcagacggattatgagagatattaacgaaagaggccgttcaatcgattctgtcattgagcagtatgtgtccgtcgtcagaccgatgcacaatcagtttgttgaaccgacgaaacgctacgcggacatcattattccggaaggcggacaaaaccacgtcgcaattgatctgatggtcacgaagattcaaacgatccttgaaaaaaacttgatataaaagggttgtgggcatgcgtatcagctttataaaatgcgcatgcccacaatttgcccacgttttttaaaagatttcattcgccatagcgttaaattggacgatagatgcagtttttttatctttcatgatatgcgaataaatgtcgagcgttgtttttgcagaggaatgtcctaggcgtctttgagcttctttaatatcaatcccagcatcaatcatcaaagctgtatatgtgtgtcttaaattatgcggagtgatttttttcactcctgctttttttatataagtggccattcgataattgaagtttcttgccggttcgggctgacctgtatgatcagcgaaaacaaagtcttcatcaacgtaattgcctcgtttctcctcttttattcgttcttgtacatgcttcaaaacacgtaattgattaatgacttgaggcggaaccggtacgttacggatagatgattgagttttaggcggcatcattttatatttccctcttaacccattcttttggaacaaagtgaatctgacccggataatagactcttcaaagtcaattttgtcccatttgagggccacagcttcgccgatacgcaaaccggaatacaccagtagcaaaaacatcgctaaatcttgaggcctccctttccgttttacagcgttcagatatgctgttatctcctccttttcccaaaattttatatctgcaagatcttcatcaacttgttttgaagaggtgtcttttgtggttttaggaattttcacttctttaattgggttatatctgaagtaggagtctttaacagcttgatccataaccatcttaattacgtgatgaaccccaataagtgtgttcttggcatattgcggcgctatatcattcagaaaattacggtatattttttcattgacgctctttaatttataagcccctaagtgcttctttaaaatgattaaactatcatgtcttgttttccaagagctttctttgacggtgggcttataatcttcaaaccatttatcaaggtaagtggccagtctaatattatcatccttttcaaaaaaatcttgatcaatgttgatttcagcttgagcggctgcaaccatagcttcttttttagtcctgaagcctttctttgttttttcgcgtcttttgttcgtgatgggatcatagtatgtaattctgtattcccaattgtctccgcgttttctataactcgccattgatcctatcctccatttttacttaaaatcactttattaatattattatgcaactcaatagaatttttttgtagagtaaagttattttcgtttgcgattagttcaattaaagttaaagcttgttgccatgtgatacctgtaaaaattctcactaaatatataatcttggtaagaattatggtataatagagaaaaatatgaatattattcttattcgaaattatcgttctttttttgatgctttcgtcaattatcgacaatgtttttcttctggacgtgatatattaatttgaagtggtgattaatatgaataaatataaatttgatgttagagggcatttgaagaatataattgagtcaaaggaagaatcgcaaaaacaaattgctgataaaattggaatcagcgcttcgcatctcagtaaattccttaatgggcaagaaatcgccttgtggatggtattggaaatcgttcgctatcttgataaggataatgaaattgaaataatgcgccagtgctgctatgaagcaacaaaaaagaatataaaaactgcatttgaatatgcacactcaaaaaaactcgattcgatgactactcatttgattggggaaacaattaatggtagcaatcgagagctgagggaatgggctttagtttatggctggcagcttgagtcaaagtattcccgtgtctatagtgaagttgaatatcttgagaagttaaaaccattgaagcctagttcgcaagatttaaaaaccctcttgttaattttagaaatgctatgtttttattatagtgggaaatttgatctttctttgcattatgtcgagaagattcacgatatgctgccagaaataaaagacccttttattcagaaggcatttttaagcaggacggatgaagctcttgctaatatgtatcttaaatttagaaataatatagagcaggcccgggaaagagccgcgaaattaatcgaacgaaatttcagtgtgaattcagtaactaatggatttttcatttcaggattatcgtatttctatgagtcttatgacaatgcagcttattattttaaaagaggtatagaacttaataactctcgagataggtattttgttgccaatgatttaagagagcaactggcgattttaaacatgttttgggaaagacctgtgtcaaaaaagcttatcgtatctgaattcataaaaaatgtagttagacagaataacttggaacaatattatgattatgaggtatactctgcattagctttttactttgatggaaaaagagagaagagcatagagaaattgcttctctcattacatatattttgtgataaaaaagactactttagagcaaatttgccaaaaatagagttgctaaaactgggggttgattataatattataaagaggggggtgaatattagtgaaaaagacagtcatagggatagcaataacattagtgatagtattagcctttgcttttagtacagcaatttctaatactgaacacaatgaaccacaacctttgcagaatcctggacacactaagcagttagctgatccaccggttggcatgagttacaaagttgtagagccgaaaatcacaaaaactgaaaaaactatattttattaaaaaagacgctgccaaaattataggcatcgtctttcgtgtttttaagaaggatttcctgttttaaaaaaatgaaaaacaggaaatccttgcttaccgatttatttttaaccatcaatacattataatagaacaaaagttcgcatgaaggggattgcataaaatgaagacagatatttcactcgatgaatttttggagaaaataaagcaattagccgaccaagaatcaatcaatatcagagctgccctttgattttctgtatgcttttaagacttctaacatcacatttatttcgtcgtcggaaacttctttaccgtcaacagttatattataattcttcctgagattttctattgataagtctctttcaaatgcaagttgtttttcagcatctgaaaacggttctaaatttttgtcgtctgtgaaaaaataagaacgatcaacatcaaaaaaattagataaagattcaatggtttttagagagggattttgtacgcctctttcgattttagataaatagctgtgatcaagacctactttttctgctgtttcacgcaacgtcagcttcctatcttttcttaatctttttattttggtgccaacactattattcaatgaatatcaccttttcaatttcattaggattcattttgttttcaatggttttgtttaatctattataacatgtcatggtgacatatagtccaaaaaacaaaattatgggttgtcaaaaaaaacgaggaatgttatatttgttttggggcatatttgtcacattttttttagagagaaggtgactacaggtgatcgagacacaaatcggtatcgagatcgggatgaaagttaaagaaaagagaaatcttctcaacctaacacagaccgagttagcggataagcttcaattatcgcgctcttacattagtaaaatagagaatggacaaagatgtccgaatttgaagacgttgaataggatttctattgcgctaaatgaatcaattgaatattttttttagatgttttggggttttttagaccacaatattcaggaggaaacttatgaaaattgaacttgaacaatcagatatcgacacaattacaagcgaagtaatcacaaatgtcagcgcagcgctggttcctaaaattcaagaaatgatcatggtactgtctgcacaggatcagttgctaacaaagaaagaggtttacgaagggatactcaaatgtactgccgctaccgcggaagagttgtatttcagtaggccggactttccttcgtttgaaccacctcagcgcccaggcggggcaaaaacccagcgaagattttcacgacgtgctgttgaggcttggatcgcaaagaactgtatttcgaacgcataaggaggttgcaaaatgtttttagaaagtcttgtttggttgcgcaaccaagtcgctgtagttataagtgagtctgtcgtggttcatgaacgagctatcgccgagctaaaagcgcaaggcggcgtctgcttgtctgatctatgtcagcaaaataccctaggctctgtaattgtaaatggcaagcggtctgtatggccgttgacgaaatcagaaggggtcgggctaaatgagcgaaattaaattcgtaaagctcagcactcatatgtttgatgacgaaaaaattaagcttattgaacagatgcccgaagccgacactttattaattatatgggttaaattacttgctcaagctggtaaaaccaatgcttcgggatacatcttccttagtgaaaatgttccatataccgatgaaatgttggcagctattttctcgcgcccgttgggggttgtaagaatggccttggatacatttagacggttcggaatgatcgagattaacgatcagaactatatcagtatttgcaattgggaaaagcatcagaacgtggatgcgatggataaaatcagggaagatacacgcaaaagagttgctaaatatcgggaaaaacaaaaggctttacagctttctcaacctagtaacgttacaggtaacgttacagtaacgcaaggtaacgaacaagaagaagaaagaagaaagaagaaagaagaattaaaagatatattgtcgagtaaacccgacgacgcatcttttttagaaaacgaaaaggacgagattccatacaaactgatcattgatctgctgaacaaagtagcgggcaaacgataccgacctactacaccaaaaacaaaaaaagacatcaaggcacgctggaacgaaggttttcgctttgaagattttaaacatgtcattctagtaaaaactaaggaatggctcaatgatcctgctatgaatagatatttacgtcctgaaacattgttcggtacaaaatttgaatcttacctaaatcaaaaaggaggatcagcaaatgaaggattttacaaaggaacaagcggccgcagtccagggcgaaatatctcggaggatgacattccatactgatgagcacggcaatcctgtttactgcgataaacacacccggattatcagtggagaagaaaagccgtatccagttcagctcatcaaacttcgggatggctctgcaaagtgtcccatgtgcgaacgggaacagcgcaataaggagattgagcatgaaaccgaggaatggcgccgccggatggatcaaaaggttttatctatgtattcactaatcgctgatccaacactcaaagaagcgacattctcaacattccaaagttataaccatgaagacgagcggaacaagcgccggatgatggagcttgttaagcaagtgaaggcgggagccgtcatgaatatcttcttaacgggtgaatctaacgcaggaaaaagccatctcgctatgtcagccattaaagagctgaacaagagggacgcagaaggatacgctaaatcagcgttgtttgtaaacagtgacgcccttatgagacgaataaagaattcgttcaaggacagctcagagaagcttacggaagctttcgcgatcgaactgctgacacgggttgattaccttgtcatcgacgatctaggggctgaggtgggcgacacagataacgaaaacagggcggcaaatgattttattcatcgcgtatggtacggcgtctctacggggcggcaaggcaaattcacgatcgttacaacaaatctatctggcgtggctctgactaaactttatgacaagaaagtcgtaagccggctcacggcacacttggaaacagtcaaatttgaagagaagcagaaggaaagaaaaggccgtactgcgcccgccctgtccttttaaggaggtgaaaatagttgatacaggcaatcatgcccggcgtgctgcagatcgtccctgaacgcaaattaacggatgaccagcgcaaaaaagaaatagacgagcttatcaaggttcttgatcaaaaaatagcagattaccagaactttagggggaatgcagtgtgaaacgaggtaaatctccgacgcgtgcgcaaaaggcaatcattaaggcaaacggcctgaccattgagaactggcttgtcttggagcacttgcagcacgagcaccgtctcatactggttcaccgctatatgaattacaaaagggagtgtttagcatgagtcaggcagtcaatgccgaacggtttgaacttgctttagaaaatatgaattatgaatggtcaatggtccagctgaaaaaggtcgttcaatactggcatgatgggaaatcaattcttgatatgtcggaattattaagcagggattcggatgaaatcattttgttggtcatggattttgcaagaaaaaacatcctgcccgcccgcaagaacggcttacgcgccaataataggataagaatatctgagaaaacgatgaaagagaaaatgattcggctgcgctatttgtttgaagaaagcccggtgtatataccttttcaggagctaaacttcatgttttatgacagcgaaatcaggcgtttccgggagctatgggcggcaaatgagtcatatctcaacatagcaaaagagctgaaacggaatgaggacgaaacattatttcttatcatcgaccaagcaaaaaaagacctcatagagcctcgggaatccggcttgctcggaaaggaagcgtcagaagatgaacgcaacaaacaaaagctaccattttgaaaaagcaaccgtccagcaacttatggtcatcgtgcgttatgaagactgcgccccggaggtacggaacgcggctttacaaatgctgattatgaagggagtggcagacgttgggacaggcagaacgaaagcatttaattgaatggcttttgcttatcggctcttttggcagagattttctaaaccgcaaatcagacgaagagcttgagcgcttatacaatcgcgaaatcaaaggattgaacgaagaataggaggacagcaccatgacagaaaacaaaaatttgcgtcggcacggcgaagttacaacacgggtgatgagcgaagaagaacgcctcaagtatataaaaaaacacccaatcattccgacggaaaaaccaaaggttggcatacagctattcccgtcaaactattggatgtaaggacggccgctaaagcaaccgccaccgtatgaataataaaacctagacacttttattataccatacggaggctttgaacatgcagccaaaacatatatcaatcaatcaaaatacaagtgtttctcaatttattgagccggggaaggtgtctgtcatcgtgttagacggcaatcaaaacgccgcgtatgtcgttgaggcaccggaacacggccacaccattattgagacattcaaaggcgggtttgaccgcgtacgctttgaccattcttacaaagtaaaaaaatagcaggggttttcccctgcgggggaggaacggaaaatgtatcaaaacgaaattgcccgcaagtgtgaacgctgcggaaaaatatattattcagctcattgggttgtatgcaaaacatgtcttttagaccgggaggcccgggcatgaaagaattcaaaatcaatttgtcaaaaggtgaagttttatataccggctcttacatttgcgccctttcaaaaacgccagccagtacacctgagcaaatcactttagaaacagccgccgaaaagctcgccgaagaggtaatcatgcaacaggctatgaatcgagaacaccagcgccagcaggaagtcacggtaaaccagtttcggcaggctcaggaagagatcagccggctacgaggggaattaaaacaagctcatgagaagtccagcaaccatctcgatgaatggcggagagccgaaacccagaccgcgaaaatatcggatgaactaatgaatatgaaagtcttactgcgagcggaacaagggaaggttcggcaggcacaggaagagattcaacggcttacaaaagagaatgacaggttcagaaaagcctttcatcagttcgcgaatatgaaaacagagagaacggcgcctgaattggtaattcaaaggtattcccgatatgcgaaggagcttcttgaaggcagaggattggagggtgatgcggaatgagcgaattatcccaagcacaaacttgtccgtattgcaattgcacagaagaagcatccttttctaactgggattcagacagcgacgggatcgtaacatgcacgagttgccataaagaatattattcaatgcccaaatatcactttgagggttggcaggttgaaaaaatatgcgaagaatgcggtcatgaagaaagtgaatgtcattgcgagggggaagaaaaatgatgccattacaagtagaactgcaacggaacgtgaaggccacgaaggacgaagcaatgaccgtcgagcaggcggccgagcttttaaaggttcacccggactacatcccgacgctggtcgctcgttctgacgatctcaaaatgatcggcgaccataccattatcgctaaacgggataaaacaaatatctggctggtcggggcgtgtgtggggcttttcttcttcgctgtctccgtgctaccgggaatgttggggtgacgggatggcaacagcagagcaattgaaacgaatgaacgacataaacgacttggtcaagcttatcgcaagcattgatcatcgtacattctaccgcaagtcaaaggatcgcatagcgtatttcagatttaagaaaaaactgttcttcgttgatgattacacaggggatgacgtttacccatatgaaatgggatacggtagtccaaacggtttttcgcatggaggcaacatgtggcaactggtcaacagctttagaaagttcatcataacagggaaatgcggcgagctgagagattataaagaaatatgggcttacagctatgaaggatgtatgaaaatccgtcagaaggcgaaggagatcggtttcattgaaagtgttgattacccctacagctttgatgaatgggcggatagtaaatgatcgaataccattgtccggactgcgattataaaaaactcgatttagaaatccgcgcagatgcctgctgcccgcattgtgggcgcgtcatgggcgctgaggaggaaatagtgtgactttacttgatgatatcggcttcacagaagagcaatatcgagagctgcgtgaaatcggtttgtctgacacggaaatagcgagagaggaactccattgctctccatccactctttctgtctggaaaaagactaacggcatagtaatccagaaaccgtatcgcctgttcactctggaagaatggacggagcttcgtaaccagaattggacacacccccaaattgcccggcatttcggtttcgaatgtattgatacttatttctatcatgcaagaaaaataggcgttccgcgtaaacggagaagggagaaagttgaatcatgaatctacaaaaaatgttcgaaatgcaaaaggagcttgatgatcggatcataaaagaaaaggggcttgaggggcaggacttgctgccaaacacttatgtcgctcttgatactgaattagctgaatttgcaaatgaaggacgctggttcaagcattggagtaataatcaaaagccaagaacaaaattatcaacaactgttggcgcgactcctgaaaacgcatcctttttccgatgtgaaaatcactattgcggagaatatttaaacaaagatgatttcaaacacttattagatccggattatgaaatatgtcctgtttgcaacgcggcttatgtaacggcctttcgtgatgaaaatccactgcttgaagaatacgtggactgcctacactttttcctttcaatagccattaaaaaaggttgggaagatgctatgagtctaccggaagaagggtttgtcgaaatgaagaaaaagggatttgaaggcggtttaacaggtgtgttcctagaaatgaaatggatgctattaaattcttacatgtccaaagatcagagcactaaaaagaccagtttcagtttggcttgggccttgttcttgagcattggaactatcggtttcggatttactttggagcaaatcgaagccgcatacatggacaaaaacgccgtcaatcatcagcggcagcaggaggggtattgatggatattatcattcgatatgtgttcaagcatcgcgcaaccggaaatattgagatcaagatatattcaatcggacaactggaagagcgagtttctaaaaagttatcgccttgctttgactcagatgaatatgaacttgttgaacgtaatttgtacacaggcagagaagatgtcaaggataacaggatttatcaaggagacataacccgcgacgtaatcaaaaatcaaattgggataatctgttatgatcgccatcaagcaaatttcaaagtagttcctattagcatgtactttgccaatgccggtaatgggggttggacaggttaccaccttagaagcactgttcccttggaagtcgtaggcaatatttatcaaagtcctgagttatgggaggacgtggaatgattggagtcatattattcctgctcctgttttgggggtttatagtctggtggagaaattattgaggggggcgcgcgatgaaagctaaatcaattcaacttttcgatctgtttgatgaattgagcgaacaggtgaacaacgtcatgcatgacgcggtgatttacagaaagcgaaacagactcaatgtgatagatcaaggcgcaaaagaggccgagcggatcacaagagaaattcaaacgcttgtcaattcgatgcgacggaagaaggtggacacggaatgccaaaagtgaatggaacattaatcggatactattgcgatgactgcgaggaatggacattcttagaaaggccagccagcacgtccgaaatttattgccctttttgcggagaacaaaatcttgcgatagattctgatgatttaagtttactggaagaaatgatgaaggagggcgtggaatgacaggaacaaaaatcacaatcaaaacaagcgataaggttgaagtcacacgggaacaggcacgggctattgatgaaggcatgaagttttatttaaaaatggctgatgctgaacccgaaagagtgaacgcgttgaccaaaggagacaaaaaagaatttgcgcgccttcaattcgtcgggaaacaatttgttatcaataatgaggatgtcgaaccgtggaccggattgtttgatccgctgaacagcatgtctgcttatgatctaaataaggcgattttgaaggggtatatcgttaagggggaagaatgatgatcaacaaagtcgtaatcgaaatcacagcagaaaaaggcattgtgaaattgtttaacgagaatggggaagaaattaacaggcaggaaacttcaccaacagaaagcggatcaagtatccagtatacaggcgccgactttgaagacatgacagcagaagaaggcatgacagacgaactgtgggaagcgttggagcagaatttttatgtccatgatgtattaacagcaatgaggggagagtaatcatgaaacaactattcaaatcaatcattctatcggcaatattatttattggagctgtggccgttgcgccgtctgcttccgccgcatggtccggctggcaaaatgaatccgggtacagcggccgggtgtttacggatgccgcgacttacacggccggcgcctcaacggtggactggaaagccgagaaaaaaggatcaagaactctttattacacggccggcgtatacaagaagcgcagcggcggcgggctgactgatacgaatttagtacagcggggcagcttcaaaacggcaacgcctctgaaatcattcaacgtgaaaacgatccggaataagaccggaaagggaacctatgtcattcagctggactgctactctgattccggcaagcggaactatattggaacatttgaatcagctaaatttcaaatcaaataagggggattcgatggcgctgagaatagtttttatgctgatggggttaggtttctggttttatttccagtacgaatacaggccggacatgaaagcaaatatcacgttaataggcgcaatcattgcattcacggccgcggcgttttttcaagatattgataagtatgtagagaagaataagaacgaatctaactgaataagtccaagacggaagaggtgaggaaatgaagaagtgcgaggaaaaagaagtcacaaaaacgcaaaaagtcttgaaaaaagtgacatgcgatacttgtgggaggactatcgttacaaatgatcggtcaaaacattactatgaagtcacgacatatcatagcaggtggggaaacgacagtatagacagttatagatatttagatttttgcagttataaatgtcttctcgaaaacatgaatgactatttcaaaaatggcgctgatacagattgttacgaaattcaatttgtagaaggagattagcagccaggcataacaaaagaagatgaaaacaaaataaatgtccaagacggagagcctgcggacactgatcattgcacagaatcactgtgctctgattagtgtccgttttttatttgaacggagggacggcatgaaagcgaagaaaaacgccgcgcagaacgttggttttaaagaaaaacagccatcgtcacgcaagagtattgaaaaaaagccgcagaagcttactgagagagatttagagaacctcatgggtgtgaacaggcctacatataaaagaggtcgtggcggagcttttagacagcaataataacgggaggggattttaatgaatcaaatgacactgaatattcctcaaattgacgaagaagcaacgagaatgaacgcagaaaagctgcttgaacaatatcgtatatacttgttacaagtgccggcggattttttgccgaaagtgaccgcaacatacagccttgttccgcccagcttttcaaatgaatttcattcctccacagaagacgcagcgttaaaacgcatggattgggagattgaaagggaccggtttttaaagagaatgcaaagagcggttaatcggctttctcaaaaagagcggcaaatacttgtcatgctctacatgcagaatgaagaaatgtatgattatgaagtctatggagaaatgagactcagtcagcggagctactaccggacgaaagcaaaagcattttaccggctggcctttgctcttcgcgtggaagtctataaggacgggggcgcgccggaatgaattttgttcagccgataagggacttagaccagatatattatattaaaaagtacctgaaagaacggagcgaacggaatcaccttctttttgtggccggaattaattcaggtctgcgcatatcagacttgcggcttttaagggttagggacgtgaagcgcatgtatatcgacctgcgggagcaaaagaccagtaaacaaaagcgaatcaaaatcaataaagcattaaagaaggcttttgctgattatatcaaggacaaggatgatcaagaattcttgtttaaaagccgcgaaggactaaataaaccgataagccgcagtatggcatataatattttaagggaagcggctgattatgttggccttgatggtatcgggactcatacaatgagaaaaaccttcggatactggcactataagaaattcaaagacgttgccttgctgcaggagatatttaatcattcaagccctgatattacgctcagatacatcggaattactcaagacaccatggatcaaacaatggatgcattcagcttataagctcatctgtttaaaaaacagacgggcttttttttatgccttatcctatgaataaaccatattgagaaaatgtcaaactcattttagagaaatgaaataaacatagtggtggcaaaggattcagcgattcggggaattggacacaatataagttatgattaattgggttatgtggaaaatcttgtcccttttccgtggtatcattaataagagatgagggaggttgttgcgaagtgaaacattgtccgaagtgcaacccaattactgaaatggagctgctcgttgcacatgaagaaatgacatatagtctttatcgctatgtatgtcgagcatgcaaaacgactgacgatgaagcggacctaattagaatcgaacatgataatttgtagattgtgggataaatagaaaaattggaagtttttcgtggtatcatcttttacaggaggtgagcggcatgagtagaggcgcaacaggttcagcgttagaagagaaaggcatggtttgatagaacgataccaagtaatgaaggggtgagcgggatgactgcggcagagcaaaaaggaatgtactaaaaagattttggcagaaagatggcacgataacggcacaccattttgttttagataaggtattatggtaataggtaataaacaggcaggcgctttcccaatcgggagggcgcttttttatttgggtagttgcataccactaaaggtgttcaggtgcacatgagcattggaggaaaggaacgtttcagggggaagggaaacctttaaacagtcttaatcccccttgattttatattctctgtaaactgcgtccggtaaatctcagggaaaacaattggcggttaacggcttgagtgcgggggcagtttagaaagaatataccaagcgctttcctaagtgggagggcgctttttaattgtcgaaagggagcgatgtaaatgaaattggaattagcaaatagaaccatctttgagttacttaaagaagcacacgcgaaaggagaaatgattgttacgaatgaaaggcagaggaggctaggaaaaacaaaagcgttgatgttattcgcagaaataaaccaactgcccgtgatcgtccggcaaatgcaaaaaagatattatcaggaagaacacccagacgttaatatatttgggcatgaagaagttctccgctttgacgcattacctctaacacttttatgtgatgagggagtaccaaaaagcactattgaagaattgaaaactaaatgtcatggggtatcggggtttctgaacgaatttcaagatgctaatgaatacgccacaactgtagtgggctttgatccagctactctaaagagagatttaagcagcctgacagtcgagaaaattttcgaaacgcctttgctaaaaattgaacttgatgagattgattccgcgccgcgcattttctataagggcgaaaagattactgatcgcgttgcggttgattttgaatggcggacggaggaatcagataaaattggttcggcctatattcgtatcaagcatggcaaggagatcaacgggatgttgactgtcgatacaaaggaaattgcatttggtgaaagggcttataggtagggggtattcaatcatgaagaaagctttgaagccttgcaatgaacccggctgtccaaacctcacacgagagggctactgcgaacagcacaagcgaaccaagccggcctatgatcaataccgggagtccgctactaaacgggggtataacagcaagtggaggcagtcgcgcgctggctacctgtccaagcatccgttatgtgccgcctgcttaatgcaaggcagaagaaccccggcgacagttgtcgatcatatcgttccgcataaaggcgacaagaaactattctgggactcgggtaactggcagcctctctgcgggccgtgccatagccggaagacggcaaaggaggatggaggatttgggaacagaacatcaaacgtgcgtgtgtgatcaatgtatgaccagactgcttatcaaaggctgttcaaagatcaggaagcacgacaacggaatcaaagagcattatatcaagtgtccacgctgcaaggctgagtatacatccttctatacgaacgaggacatcagacgaatgcagcacagaataagaaagatgtttgctttgcgtcgtaatatgaaaaaggaatcagctgtcgatctatattcaaagaaaatagaagcagcacaaatcgaaattcaagcagccatgaaccagctcaagaaggagatggagaccccccgcccttaaatccctagaggacgtttgccggagaccgcgctcccctccccattttgataaattccctaaatgaaaaatcggaaggaggtgagggaatggccagaccgcggcaacctgtggacttgttactttataaaggcaagaaaaacttgacaaagcaagagattgaggaacgcagggaacaagaaataaaggcgccgagcgacaaagtgaaggctccatcatatttgccaaaagacttaaaaagagagtttaaaaagatagcggatgagcttaaaaacatcggaattatgactaatttagatgttgatgcgctcgcccgttttttgtttgctcgaaaattatatctgcaagtaacggagcagttgcttgaacgaggaccaatgaaaacagtgatcattagaaaattggatgatgacggaaatgtaataggagaagaagaaaaaattgttccgaatgatgactattccgatcttttaatcaatcaggacaagctttttaaacaatgcaggcaagcttccagtgatctggggttaaccatttcctctcgttgtaaacttgtcatcccgaaaaaagatgacggaaaacagaaaactaaagaggaagaacggttcgggggccgcatgtaatgcaagagattacagccgaaattctcattgagcgggtttggtcatatgctgagaaaattcgctccggagaaattaaggcaggcaaaaagcaaaaatgggctgtagagcgattttttaaagatgttgaccggctcgcagaagatgactgcccttattactttgatgctgaagctgtggtggatttttatgaatggtcgcggcaatttaatcatgtcgaaggtatacttgcagggcagccgattgaattaacagactttcagctttttattgcggccaacatatacggattctataaaaaagaaaatggcgcccgccggtttcggaaagcttatatccagctggcccgtaaaaatgcgaaatcgcaatttttagctttaatcgcgtcgtatgagattttcccgacacaagaaaaacaccgggtatttatcgcaggctggtcccgtgaacaatcagatgaagtataccaggcaattcttgagcaactgcatcacgcgccgatactcaaagggaaatatacctctgccaacggccgcgtgaaaaaatataaaacaaactccattatccagcctctttcccgtgaggcccggaagctcggggatggtaaaaacccatctttgggaatcgtggatgaataccacgcacatgaaacaagtgagatttacgacgtcctggatagtggaatggtcgcccggcggagtccgttaatggccgttattacgacagcgggtttcaacatggagcggccatgctttaaggaatatcaatatacgagtaaaattcttgatccagacattgacacggagaatgatgattattttgttatgatctgtgaactggacccggaagatgacataaaagatgaatcaaattggatcaaggcgaatccgattgtggcaacgtaccccgaggggatggagtcattacgttctgctttaaaagtggctcttgaagtgcctgaaaagatgcgcagtttcctcaccaaaaatatgaaccgatgggttgaccagaaggataatggttatatgaagatgacaaaatggcgcgcttgcagcggggaaattcctgatctgcaaggactgcccgtttatttgggccttgatttatcaatgacaacagacttaacctccgttggatatgtggccgtgcaagacggctttttctatgtcggtcaacattcctttatgcctgaagcccgagccaaagaaaaaatggcaacggataaagtgccatatgatttgtggagagagatgggatttatcacttatacatctggcgaagcagttgactatcaattagttgaacaatggatcattgaatttattcataaaaaccgttttcggctacaagagacagcatatgacaagtggaatgctcttcatttagcgcagcggcttgaatcaaaagggcatacaatggtggaactgccgcagagaatcaatcatctttcattaccaacaaaaagctttcgagaaaaggtatttgaaaggaaagtcgtgcatggcgatgatccggttttaacatgggcaattaataacgcaattacgaaaatggacccgcaagagaatatcatgctggataaagcaaaatcaccgcagagaatcgaccctattgcggctgttataaatgcttacgccagagcgatgtatcacgacacaaaccatagagtagatttaaataatcacttcggctctgggaatttcagtttttaggatgtgagaaaatgaaaaaagtcaggaaaaagatcaaagctttttttaagtgtttttttcaccccaagtatatgaaagccctgctttcttttttctgcttgataataaatgatctgctgtttatggcgggagccgcctttattctgacagctgtctatagatggagcgcaaacatcggtcttattctgacgggtgtctttttaatgttttatgcgtacctcatatcaaagaaagcgaggtgatataaatgctgcttgaacgaatgtttgagaaacgttctggctcgtcagatcatgaagatggttttaacaacattttattaaacatgttcggcggccggaaaacagcaagcggcgaaagagtgagtgaaagcaactcacttgtgcagccggacatttttgcatgtgtcaatgtattgtcggatgacattgccaaactgccgatccacacatataaaagaacggaaggcggcatagagcggaaaccggagcacatgtccgcgcatgctgtttatgctcggccgaatccttacatgacagctttcacatggaaaaagctcatgatgactcatgttctgacttgggggaatgcatattcctatattcaattcggaccacatggttatccggaagcgctctttcccttgcgccctgattacacgaatgcttacgttcatccaacaacaggcatgctgtggtatcaaactgtgttaaacgggaaagccattgaattatatgactacgaagtgctgcattttaaagggctttcgactgacggaatacatggaaaatcacctattggcgttgtacgggagcatatcggggcgcaagcggctgccacaaaatataatgccaaactgtacaagaacgaggcaactcctcgggggatattgaaagtcccggcgttcctggatgaaaaaccaaaagagaacgtgcgcaaagagtggaaacgggtgaatcaaggtgaaaatatcgccattatagataacggactggaatatcaatctatttccatgcctctgcaagaagctcaattcgttgagtctatgaagtttaacaaagcacagatttccatgatttataaagtaccgttgcataagctgaacgaattggataaagcaacattttccaatattgagcatcagtccattgaatatgtcagaaacacgctgcagccgtggattgtgaattttgaacaagaactaaacgttaaattgttcttagatcacgatcagaaaagcggccattacgtgaaattcaatatagacagcgagctgcgcggcgacagtaagacgcaagcggagtatttgaaaacacttcatgaaacaggagtgctgaataaagacgaaatcagagaattacttgagcgcaaccctattgaaaacggcgataaatatatctccagcttaaactatgtgttcctcgattttgtggaagaatatcagcggcttaaagctggcggcgccatgaaggggggtgacaacaagaatgaaggataaagaggttcggcatttgacgacgccgattgagctgcgttccgaaggtgaggggcagagtgaatatatcgaagggtacgctctcaaattcgaaaaatggtcagaacgcttgggatggtttaaagagataatcagcagaacagcccttgactcagctgacatgtctaacgtcatcgcccttttcaatcataagcaggatttccccttagcgagaaataccgtttccgaggatactggccgtcttgaattagaaatagacgggataggcctcaaattccgatttaagccctcagacacgtcatatgcgcgtgatttaataaagaatgtccggagcggtgtgatcaatcaatgctcctttgctttttcacttgattatggggatgctgaggcagatgaatggcgtatcaatgaagatgaggacatttacgaacgacgaatcaataaaatcaatcgtatttttgatatttcactcgtcactacccctgcttacagcgatactgaggcggttgtaggtgcccgcagtttagaaaaggtagagcagctgaaagaaagacgtaattcatcaaatgaagcgttgaaaatggaattggaactattaggccttgtactcccggagtaaggtcttttttagtgcagaaaacaaggaggaaatgattttatgccaatgcaaatgagcaaaaaagaaatctcattaagacaacagtttactgaaaagaagcagcaagcagacaaggcgctgcaggagggcaataccgatgaagcgcgtgcattgcttgatgaagtgaaacagcttaaaaatcaaatcgaattgatgaccgaaggacgttcacttgatgtcccggatttaccgggcggtgtaaactttgtgcccgagcaagagcgcaacccagaggggcagcgttcacaaggtcaaggaaatgaggaaaggcaacagcaatacagcaaagctttccttaaaggattaagaggcaaaagacttaccgacgaagagcgtgaccttctggatagtccagaatttagagcgatgtccggtataaatgatgaagatggcggaattttgatcccagaggatattggaaggcaaatccatgaatttaaacgtcagtttgagccgttggaacaatatgtaaccgttgaacctgtcacaactcgatctggaactcgtttacttgagaaaaatgctgatatggtgccgttttcacctgtagaggaattggggaatttacctgagattgatcagcctagattcacaaaagtatcctactcaatcatagattatggtggcatcatgactctatctaattcaatgttgaatgactctgaccaagcgatcatgacatatgtagcaaaatggttcgcaaagaaatcagttgttacccgtaacaatttgattttggctgcaattgcatcattgaaaaaagtagatattgatggtttggatggtattaaaaaagcattaaatgtcacgcttgatccgatggtggcgccgggttctatcgtgctgacaaaccaagacggatatgactggttagacacgcttaaagatggaacaggcagatacctattacagccagacccaaccaatcctacaaagaagttgcttgatggacgacctgtcgtgccttttactaacagagtattaaaaactcaaaaaggtaaagctccactcatcatcgggaatttaaaagaagcgattgttctgtttgatcgtgaacaacagtcaattgcatccacagacacaggggcaggagcatttgaaacaaattcaacaaaagtcagagggattgaacgagaagatgtccgtaaatgggatgaggatgctgtagtattcggacaaatcacggttgaataaggagagataatatgagctattcaacaaaaaactacaccgccgacgggggaaatcgtaccgtcatcggcggtgttttagaaattgccgggggcaaggtcattaaagatggacaagaggtcagttttggcggcaaccaatctgaaccaggacccggaagcgtaacccatgaaatgctggcggataagtcggtccgcagcaggaatatcggttccggcagtgtaatggaagaacacttgaattcatctattttagatcgtctcaaggctattgaagataaattgaaagagctttccggttctgagtctgacggaaaaacggaataaaaaataaacggaaaaggatgattacagatggctgaagattatttatatgaaagtaatggagtcaaaacttcatctgaaaaaggaaaagacggcaaggcgataacgccggtctatctcaaagaaaacagcgaagaaaatcctctttttgtaaaagggttgcagggtgaaaaaggggagaaaggagacaaaggcgataccggtaaacaaggtcctcaaggagaaccgggtgaaactggcccgcagggaccaaaaggcgataagggagaacccggagaacagggaccacagggtgaaccgggaccggccggaccaaaaggagatacaggtgagcaaggaccccaaggtgagaagggagacaaaggtgatccggctgttattgaagagggcagcattgcgcatgaaatgcttggggaaaaatccgttcggagtaaaaatatcggctctggcagcgtaatgctggagcatttaaacagcgaaataacaaaagtgcttgatgaattgaaacaaaaaatgaataaccttgaaagtgacctggctactttgaaaggaacagaagaagaaccgacagaataggcggtgtgtcctgaatggatttagaggctattaaaaaatatttaaaggtcgagcatgaagaagatgatcgtcagcttttgaatcaaatggcggcggccaaaagctatattatcaacgggataggcaggtatattgaagggcacccgcaatttgagctagtgcttcaaatgcttgtccaacattggtatgaaaacaaagggatatatgagtccgggggaaccggcttatctatcccttttactgctgaaaatatattgacgcagctgcgttatgtatctgtggaggaacaagaaaatgagaaaaaagatcagccaactccggcaccgtctgacctttcaaaagaaaactgagacacaggatgaagaaggtaactggaatgcaacctatgtggacttattcacggtctggggagctgtagagggggctggctctctcggaaatagcgaaactatgattgccggagcattgggagtcaagacccctaaaaaaatcacggtgcgttaccggaatgatataaaaccgaatatgcggattgttaagcgcgttcctaaagaaaaaacggaacgcgtttttgatattttggacactagcgatccagatgatcaagaaaaagagcttgagattctttgtcaggaggtgggaatcaatggctgatattagctttgacggcatagatgatctaacgcagtattttgaaaaaatcggcggagacgttgaaaaggtggaacccgtagcgctaaaggccggcggtgaaattatcgctgaacggcagcgatcccacgttaaccggagtgataaaaaacaacctcatatgcaggacaacatcacagtctccaatgtcagagaatccaaggacggagtgagttttgtggcagttggtccgaataaaaaggtagcgtatcgcgggagtttcttggagtggggaacctcaaaaatgccgccgcaaccgttcatagaaaaaggcggaaaagaaggggaggggcctgctgtggaattaatggagcgaatacttacagcaccgatcaaatgatctattctcctaaaattgaattggtgagtacacttaattccagtgccttattaaaaagcctggcgtctggcggaattcataatctcgtcgcaaatgatgtcagtgcttttccaagagtggtattttcggagattcaagacgccgatacggattttgcagacaacaaggtctattcatttgaggtgcgttatcagatcagtattttcactcaagcgagcacccgcggcaaagaaacagcgattgctgccgaaatagacaggcttatgcgggaaatcggctacagccggtatgattctcaagatttatacgaaacagacacaaaggtctttcataaggccagacgttataaaaaaacctattatcaggaggggaaatagatggggaaagtattatccggtttggatatgtttcatatcgcagaagtattaaaagacacaaaagatgaattgaaattttctgttcccgaagaaataccgggcgccgttaacttgaaaattgatcctaaatcagaacaggaggttttttatgccgacaacgtggcatatgccactgttaatagtttaggtgatattgatggtgaaatggaagttgccgaccttcctcttgacatgcagtcaaggattttcggtaagcaagtggagaatggcattcatttttctagtgctgatgataagacactagagattgctcttggtttccgggccaagctctctaccggtgggtacagatactattgggtgcttaaaggaaccccagaattagtaccggttgaacacaaaacggacgaagggaaagctacgccccaaacagcgcaggtcaaaattaaattcatgcctcttactaatgtaaaagagggtaagcgcagatgggatgcaaaagcagaagaagataaggccaatgggattaacgctgaaacatggttcaaacaagttgtctataaggacatcacgaaagagggaacgcctgtcgttgatgtcggtaaataattcattgagcgcctaagagcgctctttttatatgaaaaaggaggaacttacatggaagcattgtctattacacttcgacttgatggcaaagataaaaaatttgttacacctgaccacattacaggtttattgttccggaaggctgcaaagatcgcagacgattttgaatcacaagattcagagcgtctttttactaatgaacaggttgaatttgtctgtaatacctttggccagaaatttacgcctgatgagtttgaaaaaggaattgatgcccggctggtaggaagaacaatctatgctgctgcacagtatgtgttggggaatattgcagaagcaacggctcttttaaatagcgaggggatttccagcggtgaagagccgggggagtaagtctgcctgagtcagtccttgatatgtataacgcccttgaggaaataggatatacacaaaaccaagttgacgaaatggacattgtctatcatctgaaaagactggctcggagaaaatcacaagagaagacacaaacgaaggcaaaaaacaacgatgaacctatgtatattgatcaatttctcggataaggaggtgcccgattgagcaaagacataaaggtcaggctgtattcgaattcatctgagtttaaaaaagaaatgagcgcctgtgctgttcaaatgaaaaatttgaagtcggaatttgaaaaaaaccgtacggcagtgggtgtgtggggaaacgaattaaaaactgctcaagtaaccgaaaaaacattaacacaacaattggaaacacataaacgcagagtaaaggctcttgagagagcttatgcagacgcggctataaaaaaagggaaagacataaaagaaacgcaaaccctcgcccgccgtttaaataacgctactgccgcaatgaataagacgcaaaacgcgctaaatagtacgactcagaggataaaagcgttagaggaggcagcgaaaagagcttcctcccgtgttcggatcatgggcgaacgaatggattcaattggcggaaaaatgcgttccgttggttcgtcagtagctatgacatcgggcatcgcctttggtgcgctggctctgtccctacgtgatgctgttcaggtcgggattgactttgaaaagcaaatgagtaaggtgcaggccatttccggcggatcggcggcagagatcgcaaaattgagagagcaagcaaaagaactcggtgcaaccactgtcttcacagcaagtcaggcagcggatgcacagggttttttggcaatggctggatttaaggtgaatgacatttatgacgcaatgccgggaatgctcagtctggcggcggccggtcaactggaattaggaatggccgcggatattacatcaaatatcatgtctgcctttgctctaaaagcaaaagagtcagggcacgcctcggatgtcattgcttacgccgcagccaatgcaaataccaatgttgaacagatgggcgaagccatgaagtttttggcgccgaacgctaattctcttggttggggaatggaagaatcagcggccgccattatggcttttggtgacgcaggtctccagggttcaattgccgggcaggcttttggtacatccttgatccgtctcgcttcaccaaccggtaaggcatcgaagcttgtcaaaaaattaggttttgatttcttcgatgcagccggaaacatgaaaagcatgccggaagtcgttgaggaaatggaaaaaggtctgaaaggcatgaccaaagagcaacaggcggccgcattaaaaacgatagtgggcgctgaagcatataagcattgggctgtccttcttcaaaaaggttcaaaggctctgggggataatactaaggcgcttgaaaaatcagatggagccgccaaaaagatggcggatacaatgttggataatgcacacggaagcataatagcttttgagtcagcacttgaaggagcaaaaatcaaactgacggaaagcctgctgcctgccctgggcgatttagcaaacaaaggcagcgacttgattatgatgttcaataatctggattccggcaccgtgcaaaccatagcgaaaacagccgttctggcgacaggtgtattaggggttacgacagctgtcgccacccttacagctggaataggagcgcttttggcgtttaccggtcctgttggccttgcgattgtcggaggcacagcactgcttggcggtatttcagttgctacatacgcttacactgagcaattgaagaaccagaaaaagcagcaagaagaggcgcgagaatccgccttgctttacggggagggcgtttctaaagcaacacaaaaatctgcttccgcctatgtggatttaagagaaaaggcagaactgcagctgtttgaattgacccgggtatctggttcagaagctcagaagatgtcagctaaattagttgaaacttatgccagtatgcgcgaccagctaatacaagaacttgaagggcttaaaaaagatgctctggttgtcttaaaagggctatacgcagacaccgatgagaaaacaaaaaaagccggcgaaaagatgactgacaagatggttggcgcaattgataaagatatgcaagaggctagaaataagctgaaacagttaaatgctctacaaaaagagacgggcctcgtcacttccaacatgaatgcctcacaaaagaagcaattcaatgacattgtttcctattttgaattgtctacaagtaaatttgcggccaatcaaaaagaagctttagcaatgcaaaaagtggtaacggatcagcaaggacagctttcatttaaacaagctcagaagtacaacaacgacattaaaaaagtctatgacgatggtaaacaggccgccaagaaagacatggaatacagaaatgatgttattgagaagttgtttgcacagggatatatagaggctgaacaaagaagatcattactgagcaaaagcacggctgactataataccgcattagcaaaaaacacggatgcctatgaaaaaaattcaagagccttattttccaaaatgtcacgagacggcaagttgcttgatttagagaccggaaaggcattggatagacaagatgaatttatatctaattcaatggggattatggtcaaaactgaagagtctgaagctcaatatcaagaacgatgggcagcccggcaaatagattttcttcaaaaattaggacaatccaaagaagaagcaattgagactacccaacaggctttagaagagttttaccaaggcatggggatgacccaagaacaagcccgtgaagaagcaagtcagatggttgccaatgttgaaggggaattagataagccgacaagcgccgagcaatcagggaaaaaggttgccgaggacttttccgctggcttgaagcagtccacaccagcagttattggcgggggaacggtcttacagcaggcccttaacaattcgctttccgcagataataccacgcccgcacaggccggacaaaataaaggtaatgcctttcgtaccggtatcaattctacgaggcccggtaatgcacaagcaggatcatctatacttcaatctgctttaaatgagatgaggaaaggcggcgggcaagcaaatgcagcaggacaaaacaaaggaaataagcataaagctggtttaacgtctaccaaaggcgctaatacatctgcggccgggtctctcagcttatctgtaacgaataatttagccaaaacctcagacggcggaggcggtaaaaaggccggaactgaattggccagcggcgttctcagtaaaaaaggcacagcaaacagcgctgggaaaagtgttgcaaacagcgcaaaaacagggctgaaaagcgttaagacacaaagtgtcggttctgactttgtaaccggctttataaatggaatgggatcgcaaaacggctctctcttcagcgcggcatggaacttggggaaatccgccttgcggactttaaagaagtcaattgactctcattctccctccaaactaacaaaagcggaaggaaacaacttttctgatgggtttgcgttagggatagaggacaaagccaaaaacgtaaaacaaagcgctgcttttatggcgcagaacgcgatggcctcgtttaagcaggaattaaatcagatggctttcaacataaagggggctgctgatcagctcatttcaatgaagtcggagcttaccgttcggaatgaagttgacacgcctgccttaaaccaaaaactcgatgctctaatcacactcctgtctcagaaacagtctggtggggcaggccaggccgcgatacctcagcagcctattatcatccatccggctgcggtgcatatggacggccaacaaattgcgactatcgcttttgaaaaaggagatggcaggatacttgatcagaaagctgcagaccgatacaaccagaatgcctataaaggcggtgtcagatcataatgctagatttatatattgattttaataacggtatgggggaacaaagtttaacaggcattctcccccgttttaaggtgcgcagcttcacgcctgactcaccgaatattgaacgagaaacaacaaccctcccaaggataaacggtttagtgctgccgcagcacccccgggatgttgtctacaaagagagagacatcaaggttgattttttattagattccatcattcccgaaaccttttatcagaacaggcatgaactttattcattgttagtgcagccgtttccttattatatttcgacggaccttctgcctaaccgtcggttccttgttacgtgtgacgggaattttactatcactaaggacaaacagaaaaatcatgccacatttacagtagggttcacggacattctggggcttgccgagtcgaaatatacctcttctaccatccagaatttcaatggggagcattggagtcccggcatgggaatccttcggagagatgatcttgaatatcatttcaaaaaccaaaaacgattcagcgtttacaaccccggcggcgccgcggtcaacactctgcagcatgattataaggtctttctctgggccaaagggacaaacgtaaccattgcgaaccgaacgaacggggaaaaattgaaaattgagcaggagctaaaacgctcgcaaaaagtcacattcatcaggcagtacactgtaatcggggataagcgtctgaaaacatccggccgtctgccgacactggatgtaggatggaacgattttgaaattataaactcaaatgactttgaaattttatttgatactcgtttttattataagtaaggagggatgacatggctgcggctgactttattaaaagtctggtaccaggagcgcagaaggtacggaaaaaatataacgtccttgccagtcttgtcattgctcaaggctgcctggaaagcgggttcggaacgagcggcctttccaaacaagcttacaatttgtttgggataaagggaacctataacggaaaatacgtgttgatgtggactagcgagcaggacaaatacggaaatgttgagagagtacaagctaaattcagaaagtacccttcatacgcagagagtttggctgatctgggaagcttgtataatcgtcttgatcggtataaagcagtggtaggggaaacggattataaaaaagcatgccgagccgttcaaaaagctggctacgcaacagacatcaactatgctaataaattaattaccatgatcgaacagtataagttgatgcaatatgacgatgtgtcagaattgccgaacgagcctgatgatccagaatccccggagacccctgaagaggaaccgagctttccgagtaaagaatatgcgggtaacgacatccctctaaataaaaaactgccgtcagatgtggactttcctcagctgcatgtttccacgaaagacggaaatgacgttgtggaagtaacaggcgtgatcgttgatcttacagacgatactaccgggaaaaagagctttacctttacaattaccaaaacagaaagcaatgcgactgaattcgatttactgatcaacgacaatattctttacattgacgaaaggagattcaaacaacaaaaatactatattacagatgtagacctgaagcaggctaaaaacgtcctgacaaaaacaatcacggccaaccacatttttaccgttctgcttgctgagaatcgagtggatgatacagtaacgaagaaactgaccgtaaaagaggcctttgacattgcgttaaagggtactgatttttcatatgtgctagaagagcctgaaagaaaattcgccaccgccgaagaagagaatttcggtgataaaaactccactgaattaatagatcagctcataaatgattatgagttagagcttgacgtggataattataaaattcatgtctataagaaaatggggaaagagattcctttcacatttgactcccgttataatatgccgggcatcagtatcaaaaccaactcgcaaaactgctctacccgtgcatggggatatggtgcgatgtctaaagacagtaagagcacagacaaaaaaccgaaatacgtatttgagccgatcttgtacattcatccagaggaaaagaaattcctgcgggaaggtaaaccgaagtgggccgacccgatcagagacgaaactataaaaaagtcgggcagcatggtttctgcgctgaaaaaacatgtgaatccatatccggaaacagtcgtcagtgtggattatcaatatgtatacgaaccaaaattgcttaaaattgaaaagccgttctggaaaggcgatacagtccacattttagccgacacagcagacggaacgacttatgaggatgatgtgcggctcttaacgatccaatacaatccgctaaatccatacagcagcccgaagctgacttttgccaatttcagaaaagatatacaagatattgcggtgaatcaagcgaagaagctgagagaacaaaaacgatatattgatcaaatactgacagcgctttgataggcgttttttattttgtcgaaaaggagagtgaatacagtgttgaggttgaaaaaaaattacgataccactagaaactctcgttatgaggatgagctatctggtgatatggaagcgatcgagagtagcgtaaacgggcttgaaagtgaaattacacgtcataagaaagctgctacggcgcatacatctgagcaaattgatcacgggggcttttctttacgaacttatattgacggactctataaccgggtgcgcaatctcattcttaatgccgacgggacaaatgtaaaagaagtagtggatgcccgtgttaatgctgatggggaaattgccccactgttgaaagagcgtctcgacaaggaatataacaaacttctacgtaagatcaccagaaacgttaacgtagacgactacggggccgaccctaccggggagacagacagcacagaagcattcaaaagagcgatcggaaacggaaaggtgcggctcaatctatcagccggagaatacgtgataaggggcgtaaagctgccgtcatggacgtatttgatcggccagggcatgggcgtcaccaagctaaaactgcacgaggacacgccggccagtgagtgggttgtcacaaatgctgatcatgcgaaaggcaaccggaatatcgttgtggaaggtatgtcgcttgactggaatcctgatcgtcagggcggcgtaagcgcaaccggaggtgtacattcaagctgtcttcttttcgcacaagtaaagtttggtattgcgcgcggcgttgaaggcattaatcccggcttacattgttttgatgtatcagcgccttcttatgacatcacagcaaaagattacacggcaacggggagcagatatatttggatcgacaagtgtgtcggctcggggtatggtgacgacggcattacgacccattacagcgagtatgttttcatcacaaacaatgtgatgacgaatccgcgcggcactgcacaccgtaaaggcggagccaattcaaacggaattgaagtggacgacggctctaagcatgtctgggttatagataattatacggaggggaatgtgcggggcgtagaggtaaaagctcataaggaatggccggcaccgagtgacgttcacattcgcggtcatgaatcatttcgtgacgttcgctcatttgatttacggcatattgatcaccatcttgtaaaagacccttggagcgagacggctcgtgatgtgacattagtagactgcacatcccgtgaacccgtctataattcgctttatgaaggattagctccgaaagcccttgtcgtttcggcgtaccagcgtgttcagataatcggttttaaagcgattggcgatccgacatatgactacaaagacagctcgatcattgccttccagtataagagcaggaagataacagtaaacaacttgcacattaccggatttaaaaaggctgattgtgacatttatattaccggcggcgatcagatgaccgacgatgtatttatttctgattttgttatacatgattccgcaagaaccggcattgcgatagggggcggtgtatataatgtcaacttgttaaatgggcttatgcatgtggcaagcggaacggccggcattacatccccgaacacccagaccaatatttttcttgtcagagcttacggttataaagatgcggctgtccttgccggagaaaagcattcagtcgttccgaataacgtcaagggaggctttcgagcagcttccagctccggccatgcacttacgaaatacagcgcgattattgcgtgtacggggccgacgtacgcgaaaggtgagcgcaacctgcttgcagggaacgccggcggctcttcctcagaaggctcacgcaacggtgtcatgttttcatacgattctcatacaacaggagacgggccgtcctcgggtgtcatgttctccaaggccactaagaacagcaaatcttacacaatggttttaggccatggaaacggcaaagcctccgaagccaacaaaaaaattgaatttaacgcaaagggcggaacagtcaaggccacaggcgccatcgagagcgtctcgaatttaaaagacttggcggagtattttgaatcagctgatggagcaaagatagaggcatcttatctggtagcgttagagggcgacaaaatccgaaaagcgcaagaaggcgacaagatactcggggtcgtttctaagactgccggcgttgtgcttggcggagctgccttctattggaatgatcgttttcttcgtgatgaatttggcggcattatctaccgggaagtatttgacggagaggacatcattacgattccagctgagaacccgaactatgatccggaagctgagtacaagccgcgagaggaacgagacgagtggcatattattggtttgattggtcaagtgttcgtgcgcgttgatgataccgttaacgtcggtgacagtgtttcagcagttgacgggatcgcgacaaaggcggaaagcggcggatacggaaccgtgatgagatttgaatccccgtacgatgcggaaaaaggatacggtgtggcgcaaatgatggttacgccgcagcactaaggagggataagcgacgatgtataaaacgggcagcgtgccgatcagcattaatacaaatccaatcaatggccagagtacaaatatacaatttatgacgcaagacacgggcagcgcaaagctgtttttttcttttacaaaggatggtgtaccgttgcctctgtcagccgtagacgcaaaaattgtcctcctgtatgatgatggatcgttttataaaaagagcctttccatcattgacaaggtaaatggaacagcggaatatgtgctgtcgaatgcagaactcaagcattacggaacggttaaggctgaaatcaaactatattacacgaacgggcaagcgctggcgacttcattttttactttctctatcgctaaaacgttagaagatcaaaatatcattccgacagctgactattacattgacgattttgaaacgctgagagacggggtaagccgcattgtggaagaaatcagccagactgtcgaggaattacaaaagaaatttgccgatcttgaagccattgaaacgaaagaaggcgcgcagcagaaggcggatgatgcagaggaaaaggccagagcttatacggatgaacatgcgaatgacgaagaaaagcatatcacggatgccgaaagaaaggcgtggaatgccaaggaaactccctccggcgcgcaaaagaaagtagacgcccatgcaaacgatcaagaaaagcatgtttctgcagcagatcggaaggcttgggacgccaaggaaaccccttcgggtgctcaggataaagtaaacctgcacgccaacaatacggacattcacgttacggccgaagatcaggcgtattgggatgatatgacccggcagttcaaagctcataattacaatcaagaacggcacatctcggcagttgagcggaagacatggaacggggccgccacctatgccaacatcatgctgaagaacggagccgccgcagggacgcggacaccgatgtatgcaaaatggggggcgtttttaatcttacgggggcatgtgaaaacagacgccgaaatcatattcggctccatccccgcggaatacgcacctgctggcggttccgttataacagtgccgttaagtggtacaggcggcacagccaatttgatcatttatgatgatggagacttgaaaataaaatacccggacccggcggactcaagtaagatgggtggaggctactatctggatgtggtcgtgggcttccaggaaggagggacagcatgattcaggtttatgaatatgatgaaaatttcattctaacccagcccctttcaattaaaccggatgaagaaggaaattatacaattcctgaaaattgcacaatcgtccagcctccttcttttataaaggcgatgtatcatccagctgagaagatatggacggagacggccacagaggaagagaaaaacgccctggaaaagcaaattgaaagcgggcgggtgccttctcccgtcgatgaattgaaagctcagaacgcggccattacaacacagcttgcggaagcgcagagcctggccgagtcacaagcgcaaatgatagccaatctttatctattgctggcggagggagggaaaggggtatgatggattggtttaaaagcgttaaaaccatctacggatgggggccgcagtattatagtaatgcagacgtggcccattttgttgagtggggaagaattacagaagacgaatacaaacaaataaccggcttgacctatccgatgacaaaacagcctgtcagtgtggatttaggcggcgccgcaaactgatcaacacccggagaggtgttttttattttgcctcgaaggaggtgataacaattggagggaatatacgtgtggatgaattttgagagcttacagatcgcaagagcatatctttttggggaggtgaaatatcttgatttaatgctggtgctgaacatcattgacatcattaccggtgtgataaaggcatggaaattcaaggagcttcggagccgtagcgcatggttcggctatgtgcgtaagatgctcagtttccttgtggttatcgtggcgaatgctattgatacgattatggatctgaacggcgtcctgacctttgcgaccgttcttttttatattgcaaatgaaggcctttccatcacagagaatttagcgcagatcggcgtgaaaattccggccgccatcactgaccggcttcatgtaattgaaagtgacaacgatcagaaaacagaaaaagaggacaaagctgctgagtaaatccggcggcttttttattactcaaaaggagacgatgaaacatggtgaaaatcactaaagactttattccagtggggcacaataacagaccgggatacgcaatgaacccgacatacatcacagttcataacacggcaaacacgacacaaggggcaagcgcagccatgcacgcccgttatgagaaaaatccggaaacacccaccagctggcactttacagtagacgacaaagagatttatcaacacctacccttgaatgaaagcggttggcacgcgggcgacggaaacggcaccggtaaccggaaatctatcggcattgaaatttgtgagaatagtgatggagattttgaaaaagccgtggcaaatgcgcaatggctgatcaaaaagctcatgaaggatcagggtatttcccttgcaaacgtggtccctcaccagcactggtccggcaagtattgtccgcgcaagctgcttgatcgatggggctcctttaaagcaggtatcagcggtgccccgtctaaaacggtaaaatctcctgttgataaaacaaaagaatcttatattaaaaatacagttattgctgacagccttaatgtgagaactcaacgcaatgccaactcgtctattgtgcttgctcttcctaaaggttcgactgtccaatataaaaaaggatcgactcaaaatggttggggttacattaaatataccaattctaaaggagccacatacagcggttacgttaacgtaaggtatatcaagagcgatgcagagttagggaaaaccccttcaaaatctgctcctgctaaatcttcaaacaagactagcgggggtattaagtctgtaggcaaaattaaaattgttggtgttaaaagtgcagccattattatggacaaaccagaccgtaaaaacgccaagaatgtggatacaattggtcttggcaagacaattaacatctcaggttctgttaaaggtacaaacaactctaaaggctattgggaagtcatccacggcggcaaacggcggtatgtgtctggacaatatggaaaaatggtttaagtaaagcgtttttaaaataacgaaaaagcccccttttgagggggttttattttggttcaatatttattattagcgatattgatggaattttagccatagtaacagagtagtccccatcaattgcatcaagaatttcttcgtcactttttaaaaggtcatataaatgatctttatcaattcctaaagtttgaaaaaccgcaaatatattagccagacctattggagaagccatattatctgaaccagaagtgattaactgtaaacggtagaatttatgattgttgtcataccatgctgccaaagtgaaagttccaccggagccatcagtatctgtttttagctctcttgtgtaaactgtaccatctttgacttcggtaagtttaaaatccccgatatcatctttattaattaggctaaggtcattgttttcaatatcttgggcagtttcattgaaagtttgtacaaattcatcaagactaaagttaaattctttttggctatcctcaacgctctgaacgtaagagtctccctcgtcttcagaattcattggctcctctgtagtgctttctgtggcagcagtgacatcctcggttttggatttgtgagaatctcgatttaacgtaaccataataaaaaaaagagataaagccaaaacaaggcttattggagctatttgtttacctactttcttagttttttcaaagaagataaaaatcaatgctgtaataaagacaaaggttgctaatattgcaataatgccaagaataatcatatgatccccctcttattttaaaacgaacgtttacattttaaagcaaatgaggattcatttctattctttgtaaagtctttgatgatgattgttatcactctttgaaagtgaaagcgtcgctgaagtaaggaaaagaaagctccttcttctaactaatatattaatagaactttaaaatgcaaaatggggtttcaacttaattggtaaatatgataatatttaacatgtaataaaattggtagaaaggaatgattaaaggaatgagaaagttgaagagtagtgcgattatcattttgtcgtcggtcgctcttttggtcactgtcctgttaagcactcctgccaacaccgtagaagcaaaatcaatcatgaagaatttaacgtcggaagagaagatcagtgaagcattaaaacaagttactgaggctgattacgaaaaggcagagaaatttgttcaaagcgcattaaaactcaacgatgattttacatacaccatagatgttgaaaaagctaaacaaattggctattcaagcgaagaattatttaatatgtccatgttttatgaaagcattccgagcaaacaagtaaaatggttagaggaaaacaaaggtgaaaaagttgaaatcaacggggatgcctcagcaacatttgtaccagctatcccttgggtagtttatattgctttgcaggagctgcttgcccttttgacagcaatcgggcttgctggattagctcaacagtttttgaaagaagtctataatgctggaatgaataaagcgtgcagaaaatttgcgaagaaaaacaaatatattaagagtttctgtaaggcaaacggttatccaactaaataagaaaaagcctcctgtaggggaggcttttttttattacctcagcacaagccataatgtcgtaacgacagcaaccataaagtaatctccgtcagtaagcttagtaccatttttaattaagacgttagctacccaattggcttttgttccttctgacgcattgagggctaccttctttccaacattgtaataaaccactttaaataaataatacactaacgtacagaacaaaaagagcaatatgaactttcctatgaacaataacacgcttcaatcactccctcctcacaatacccattattttaccaaataaggattttgtttaaaagaggatatagcctatccgaaaaaaactacttgtttagtttcccggtggcttttcttgcagcgtggaggcttatcttttttccgaacgtgctgttaaagcaggaagatgcccgtttgcccacagaatgcccactcttttttataaaacaaagcaaatcagagtaaaaaagaaaatgtctattacacatgaaatccttgatataatgctttttgtttgcaaatcaatcgcaatgaaaaccattgatgaaccattgatctgatggtcacgaagattcaaacgatccttgaacaaaatgcaattttgtaataccatagcatagacataaataactcagaccatattatgtataggctggaagggaatgagacagttcccttctttccctgtttataaaccgaaacatttgcagaaaacacacattcagtttaagataaacagtacctatatgggagagaagaacgaggactgccctgtgttctcattcttgattttttcgtttatgctctcatacataatcacacgttattgttgagggacaaccaccaaggagtgaaggaacatggcacaagaaaaagtttttccgatgactcacgaaggaaaacaaaaactagaacaagaattagagcaattgaaaacggttaaacgtaaagaagtagtagaacgaattaaaatcgcaagaagcttcggagatctgtcagagaactctgagtatgattctgcaaaagaagaacaggcatttgtggaagggcgcatcacgacgcttgaaaacatgatccgcaatgcgaaaatcatcgaggacgacggcggttcaaatgtagtcggtttgggaaaaaccgtatcattcatcgaattgccggacggtgaagaagaatcttacacgattgtcggaagcgctgaagccgatccgtttgaagggaaaatttcaaacgactcgccaatcgccaaaagcctgctcggcagaaaagtggacgaagaagtgacagttcagacgccgggcggagaaatgctcgtgaaaattgtgaaaatttcataagatccgtttaacaatgaaacacctcgtccaaaatgtggatgaggtgttttttatgatcgtatcaaaaaggctgaaaacggccgtgatttgttttctgcttgtgtttttctttctgcttgcgaggctggctgaaattcagctgttttttacagaatctttttcaaaatccaatattaatctgattcaggaaagcgtcaagcagcggacggaagaagtccttatttcagatggacgcggctcttttcttgatcggaacggcaaagaactgaccggaaaaaagcagcctgccgtcatactgtttccctttctcgtgacgcaggattggccggttgaccgggtatcagacattctcggaatgaaacagggggagctcaggcagctgctcacggaagcgaaaaaaccggtggtcctgaacagcagaaaaataaaacatttgacgaaacaatccgtgtcaaatatcaattctttgaaatatcccggcatttacggcgtatatatgaaagacagcaaagaaacaaacatagccgctcatctgttgggcgcgacaaaccaggaccctgagcttttgaaaaagaaataccccggcaggaaggaactgccgatcacggcaaagatcgggacaagcgggatggagcggacgtttgatgagtttttactggcggatcaggacacaaaacttttgtatcatgtcgacggaaggggaaaccctttattcggaatggacgtcaaatatacggctgaagcaaacgcgttttatccgctgcaagtcaaaacctccatcgaccgcaatattcaaaaagcaatggaagatgtattgaaagaccgcgggttaaaaaaggggggagccgtccttttagacattgaaaaaagcagtgtgctcggaatggtatcaaagcctgacgccgacatgtcaaagcagcagacactgcaaaattacatgctgacgccgatttatccgggatcagtatttaaaacggtgatcgccgcagctgcaatagaacaaaacgaagtgaagccgggcacatcctttaactgcaatctcaacctgtacggagagccgggggatgacaaaggcacgctcagttttggagaaagctttgcccaaagctgcaattatacgtttacaagccttgcggaaaaattgatcaaaaaagatgattccgttattgaaaacatggcggaaaaacttggtctcacccagcgggcgggctgggaaggcaagctgtaccgggaagacggattcaggcagctgtataatgaaaaaagcggggtcatttggggagatgacaaagacaaaaccgtaaaaaaagccgtcgcacagacggcgatcgggcaaaaaaacgtgaaagtcacgcctcttgaagtcgccaatatgatggcggcgatcgcgcgcggcggtgaaaaaaaacaagtcaaaatcgcggacaaaattgaatacaaaaacaaaacgacgatggcgtcattcaaagatcagccgttaaaaggggaaaacatcgacaaatatacggcgcagcagcttcaaaaaattctcagagaagtcgtcacctcaccgaaaggaaccggccgaaggtttcaggatctgccgtatgagatagcaggcaaatcgggaacggcccagacgggaatgttcacaaaagaaaaacagacgctttaccacaaatggtttgcgggatactttcccgcggacaagccgaaatatgctctcgtggtgctgcacatggacacgccgggggataaggctctgacaaatacagtgttttatgatattgttaaaaaggtacatgaaaatgaaataaatcagacatagaacaaccgctcagcccatgttaaaatatatgctgagcaagagggataaaggagtgcagaatgattgagcaataaacaatctcgttttgaaaaccgtgataagcgcagaaaagcaaatatggtgcttaacattttaattgctatcgtatctattcttattgtcgtcgttgccgtcagcctcttcatcaacagtccgtcgagcgacgtgagcgaaaaagcggacacgagccagaagcaggaaacacctgcatcaggcaagacgaagcagacatcggatgaagacataaaagacagcaaaaaagatacggcatcagacgatgacaaaaaagataaacaggataaggacacatctgattcatcttcagactctgacagcaaaaaagacgatgattcatcgaaaagtgatgacagcagcaaaaaagactctgattcaagcgatccttttaaaggcgcaaaaataacagagggcggctcatcaagcgatgtcgagaaaacaattgttaacccaaaatggaaagcggtcggcacaaagcagacgggagaacatgcggcgacgtatgactcaagctctgaagactggtccgaaatgcttgacgccatctcgtacgcaacaggcgtgtcaaaagatcatatgacagtgctgtggctcggaaacaatggaagcccgcaagatgcgaagggtaaagttttagacaaaacgaacggcaaaaagtatcaggttaccatcacttggaaagacaaaaaaggctggaagccgacaaaagtagaaaccttaaaataaccgcaaaaaagcagctgattaatcagctgcttttttttgtcatacgtcagctgaaaaatgcaccgacgcgctgtaaaggattctgccgtcaacggccgtcacctgatgggatacggaacggacgcgaagcataatcgcctggttgttttcaatctgaacgtttattttcttttcaagctcctgcaaagatgccgcttcgaaaaattctactttatctttgattaaatccaattgaaaattcatcagtacagatcctcctgatttttcttctgagtcaatgaaagtataagcctttctgccgtaattgcgcaataatcccaaagtattttagtacccttccattcttttttgtgataggataggaactgttccacgattaatccatactatacacataggaattataaattatggagagtgaaaaatatgggccgtgaatttattcctttatttgaagattgggcagcgacttatgatgccacagtgcacggggctgacaaacaatatgccgctgtttttaaaggatatgacaacattcttgacagcattgtcgcactttcaggttcaaacgttttagagttcggaccgggaacggggaatttaacggcgaaattagccgctgcgaacaaaaaggtgtttggtgtagaaccgtctccgtcaatgagaaaactggcggctgacaagctttctgacaaagccgtgttcagtgacggagattttctggagtttcccgctccgccttttcaaatagataccatcgtcagctcgtacgcctttcatcatttaaccgatgaagaaaagcgaacggctgtaaagcagtatggcgcaatccttcagaagcatgataaaatagtgtttgccgataccgtctttaaagatcatgaagcttatgatgaagccattaaaaaagcaatccgaaacggctatcatcaattagcggatgatttaaagacggaacattatccgacactcgggacaatgaaaaacatcttttcagaagagggatttgccgcgcggtttacgcagcaaaatgactttgtctggataatggaggcgattaaacggtaattcgaagggattgtgtataaatgaaactggcagtcatcggagcaatggaagaggaagttacgattttaagaagcaaactgaaagacgcaaaacaggagatgatcgctcactgtgagtttacaactggcagctatgaaggcgttgaagtcatcttgctgaaatcgggtatcgggaaagtcaacgcggcgattagcacgacgcttctgcttgaccgtttcaaacctgattatgtgattaacacaggctcagcgggcggttttcatcatacattgaatgtaggcgacgtcgtcatctcaacagatgtccgccatcatgacgtggatgtgacggcgtttgactatgaatacggacaggtgccgggtcttccggcagcatacaaagctgatgaaaagcttatcagcattactgaggaagcggtttctgaactgaacggcattcaagtcgccaaaggcacaatcgcaacgggagattcttttatgaatgatccgaagcgggttgaagacgtacgcgccaaatttgcggatttgtacgcggttgaaatggaagctgcggctgtcgcacaagtgtgccaccagttcaaaacgccttttgttgtcatcagagctttatctgatattgccggaaaagaatctgacgtttcatttgataaatttttagaacaggctgccgttcattcaactgagcttgtcctgaatgtcatcaaacgaattcactaagcgggggattctcgttctcctccgcttttccaggaggaggacatatattgaacgtgataacagatattacagaactgatcggaaatacaccgctgctccgtctcaagcattttgatctaccggagggaacagcggtttatgctaagcttgagatgatgaatccgggcggaagtattaaagacaggctgggcgggatgctcattgaagatgcgcttcgcacgggaaaggtgaaaccgggcggcgttatcattgaggcgactgccggaaacaccgggatcggactcgctctgtgcgccagaaagcatcagcttcgcgccgttttttgcgtcccggagcatttcagcagagaaaagcagcaaattatgaaagctctcggagcggacatcgtgcatacgccgagagaagaaggcatgcagggagccatccgaaaagcgcttgaactggagagagaaattaataattcttatgccgttctgcaatttaaaaaccgagtaaatccattgacttactacaaaacgatcggacctgaaatatggaacgcgctcggcggggatatccacgcttttgtcgcaggagcgggttccggcggcacctttgccggtacggcagcttatttaaaggagaaaaatcctgctgtcaaaacggtgatcgttgaaccggaaggctcgatcctgaatggcggagagccgcatgcccataaaacggaaggcatcggcatggagtttatcccggattatatggacgagaaccattttgacgccatttacacggtggaagacgatacggcgttttcgctagtcagagaagcggccgagaaagaaggcctcttaatcggaagctcttcaggggcggctctttatgcagcgcttgaagaagcgaaaaaagcgcccgccggatcaaatatcgtcaccattttccctgacggcagcgatcgatatataagcaaaaacatttttcaaggaggtcagtaagatgaagaaaaaaacgctgatggtgcacggaggaattacgggagatgaaaaaacaggagcggtttccgtaccgatttatcaagtaagcacgtaccggcagccgaaagcgggcgagcacacgggttatgaatactcaagaacggccaatccgacgcggacggcgcttgaaagcttaattgcggagcttgaaggcggcgcggcgggatatgcgttcggctcaggcatggctgcgattactgccgtcatgatgctgtttgacagcggcgatcatgttattttgacggatgatgtatacggcggcacttaccgggtgatgacaggcgtgctgaaccgtttcggcattgaagcggactttgtcgatacgagcagcaaagaaaaagtcaaaaaggccattcgcccgaatacgaaagccatttatatcgaaacaccgacaaacccgctattgaaagtgactgacctcaaactgatgtctgacatcgcaaaagaagcgggtgtattgcttatcgtcgataatacgttttacacgccgtatttccagcagccgctcagcttcggcgcggacatcgtgcttcacagcgcgacaaaatatctcggcggccacagcgatgtcgtcggcggcttagtcgtcacggctgataaagaactgggcgaaaagcttcattatgtgcaaaactcaacgggcggcgttttaggaccgcaggattcatggcttttgatgagaggcattaaaacgctgggactcagaatggatgccatcaatcacagcgccggaaaaatcgccgagctgcttgaagcgcatgatgccgttcagacgctctactatcccggatcagcgaaacacccgggccatgagctgacaaaagcacaaagctccggtttcggcggaatgatttcctttgatgtcggcagcagcgaacgcgtcgacgcgtttttagaaaaattgaacctgtttacgatcgcggaaagtttaggagcggttgaaagcttaatctccgtgccgtccagaatgacgcacgcatcgatcccgcgcgaccgccggcttgcgcttggcattaccgacgggctcgtgcggatctcggtcggtattgaggatactgaggatttaacggcggatgtgaaacaggcgcttgattcacttttataaagaatggatagatttacattctctgtcggctgtcagcttgtattataatgttggtagactataaaactggcaggtgaccttatatggagaagaaaagactgaaatcattaatagaagattttaagcattacgcatttattctgcttgcagtcagcaccttcatttatatcggcgcggttcttcccggacaagggctgactgcgggccagaaaatgctgatgtttgtaacggattgtgtatttttagcgggcgcttatttctgcgttgaccgttcacttatttataaaaagaggctggaagaggccgaagaataaaaaaaagccattgtcttttgacaatggctttttcgtttcttattcagacggggtttcgcgtaattcttttcccattccttttaaaaactgcagcccgaagccgagcgcccggttaatatcaggatcaccgacggctttcatcagttcaaacatactgactttcctgtcctcttttaaaaatctttgcgcctgatccgtcccggccatggcgctttctaaaagtctgcccataaattcgggatcagcttttgacagcgcgcctcccgcggccatcatcgtattcaggagattggtgacaggttcccgggaaatctgtccgagtgcgattttggcaatctcctcttttgcctggagcatatagccggcggcatcaaaaatgcccaagccattcagctctgccatgatggacatcgttttcgcgacggcttcttcattttctgcgagaagcgtcttcagttcttccagtttttcagctttcagctgttcctctgttttcgtttctttttgaatttcagtaattgggcttgccataatgtttcctcctttccttaatcagttaagtgcacatagcccggacggttccattttcgctgagcttccacaccgttttgcggatgacgttttttgttccgcggattcgttttcggaagcggcggagtatcacaggaaccaagcacttccatgcggacttttgtctgcttataggcaggtgtatgtgtccgtgaatcatacgcaggcccggtcaggaaattaatcgcagaatctttatctgtagagttcatcggcagataaagctcatttgcgcggactcggtctgtcacaagcgcgttcaatttaaccgccccaaaaggagagacgagccggatcattgtcccgtcgcaaattccgcgttcagccgcgagctccggcgatacttcaacaaatacatccggaactttagactgaatgccttttgacttgtttgtcatgtttccttcgtggaaatgttcaagcatccgtccattgttaatatgcaggtcatattcttcagggaatacagcaggctccacccaatcgctcagcgcaaaacgggcttttttgtccgggaagttaaagccgtcttcataaagaagcggagtgctttctcccgtaaagcttccccataggaagctgttccagccgctaagaacgtcgtagcttgcttttccgaacagcggagaaaggctcgccatttctgagaaaatgtcgctaggatgcgtgtaattccaatcagcgcctaaacgattggcgacttcctgaataatccaccagtcgggttttgcatcgccgagtgtcggaagcgcctgatacaacctttgcacacgccgctctgtgtttgtaaatgttccgtctttttcaagagatggaaccgcaggcaggatgacatccgcgtattgcgccgttcttgaaaggaaaatatcctgcacaacaaagaaatcaaggctggataaaatgtcatgaacatggttggcgtttgaatcaacgagcgccatatcttcaccgacgagatacatggctttcatgtttccttcttcaatcgcatggagcatttcgatattatcaagacccggcttgccgtcaatttcaacaccgtaagctttttcgaatttagcgcgtgccgcatcatcggtaatatgctgataccccggaagccagcctggaagagttcccatatcgcaagcgccttgaacgttgttatgtccccgcagcggataggctccggcgcccggacggcggtagtttcctgtggcaagcagcaggttggaaatcgccgctgatgtatcagagccgcctgtattttgagtaacgcccatgccccaaagaacacaagtgccgtctgcatcacgaatcatttcggcaatgcggatgatcgtatcctgagaaagtccggtgatgcgctccgcatattccaatgtgtatttttccagcgtttctttataatcatcaaagtagttgacattttcatcaataaacgcttgatcgtgccagccttggtcaatcatatatttcgttactgccatgagccagacctggtcagtcccttgtttcgggctgataaagaggtcggaccgttcagccatttcatttctgcgcagatcggcaacaatcagtttttggccgtgcagtttatgcgcgcgtttcacgcgtgtggccagaaccggatgtccttccgccggattggcgccgacgatgagcacgaggcccgcttttgcgatatctttaattgtgccggcgtctccgcccataccgacggtgcggaataagccgtccgttgccggtgactggcagtagcgtgagcagttatccacgttgttggtttcaaatacttgacgtgccaatttttgaatgacgtagttgtcttcattcgtaattttagaagaagaaataaaaccgacagaaccatttccgtgttcggccttgatcgaaccgagtcttgaagcgacaagatcaagagcttcttcccatgacgattcaacaaatgcgccgtttttccggatgagcggttttgtaatccgttcttccgaattcacgaagtcccagccgaatttccctttcacacatgtggaaatcgcgttaaccggagcatcggaaacaggctgaattttaaggatgtcacgtccttttgtccatacttcaaaagagcatccgacgccgcagaacgtgcagactgtttttgtttttttcgtccgtttatcgcgcatagccgcttccacttcagacacggcgaagatgcttgtatagtcgggttcaacatttttcactaaatcaatcatcggttccatgacatcttcttttattcctgtcataaatccggcttggccgagcattgatttttccatcagggcgttacaaggacagacagtgacacactggccgcagctgacgcaggaagattcattaatggcgacgccttcatcccaaatgacccgcgggcggtcgcgctcccaatcaattgaaagggtctcattcacctgaaggttttgacacacttccacacattggccgcaggcgatgcattggttcggatcatagcggtaaaacgggtgagacatatcaaccgcgcactttgaatcatctttcggcgtatacggatatttctgatgttcaattcccatcatttccgctgtattatggagtgtgcagttgccgttgttgttatcgcataccgtacagtaaagcaggtgattctcgagcaggcggtccatggcctctgtctgagcctcttttacccttcccgacgtaagcgagatggacatcccgttttctgcagccgtggaacaagagcgctgcaatttcccgtttacttcaacaatacaggtgtcacatgtttgaatcggatccacttccggtacatggcatatttgcggaatctcaattccgttttggtttaaaatatctaaaatcttagacccctctggtgcttcatactccgtgccgtcaattttgacacggatagactgaacgtctgtcacttccaattcccctccatcttttaaactcgaaaaaagccatgcacatagataccggcctcctgtccggagaacggtataaatacgcatggcggaatagttcactagcaagtcttactaacagaccaatcctatttgtataaaacgatagactcataacacgtttcctattacaaatccatcttcactgcttttattataaggtgatatttattataatacaatacgaaaggaaaactttaaccaagtgaaatgtcacaaaggggaaccgggaatgtctttcataggctaaaatcggaggggacaatatgtctaaaaaaattcatgaatttaacgatattatccggaaattgcgcaaagaattatttggaaaggggcctgaacgaattcacaccgtttttgtggataacatggcggtatctacactttacggcaatctaagcgcaagtgagcagtttatcgcacgcacgcctgaaggaagagaaatggttcatgcggcgcgaaccagcttaattcaggagctgtattcaaaacaaacgcctgacggaatggaagagctcatcggagcaaagcttgtgcatctgttttcagatattaaaatagaggaaaatattgctgtatcggtgtttgtctttgaccgctcaattgaagagcataaagaagaaatcaaaagctgacaatattcaattgacacgaaattgtcacatttgatatgatatgaactgccagcagtggcctaaggacgattttttatggaatgtgtgcatgatctgtacatattctataccgcatattttcattctgcttgatattgttgtatgggtatgcatacaagttaggcagcattcaaaccccgttttttcagacgggttagttgaatgctgccttttttgttaggcgtctttggaaactgcgggctgaaatgataaatggaggggttattatggcttttcgtaaaccggacgaaatagcggagcttgcggtcgaatcaggggtaaaaaaggtgcattcaccgctttcagcactgattgtattaggatttttgggaggagcgtttatcgcactcggttatttgcttgatatccgtgtcatcggcgaccttccgaaagaatggggaagcctgtcgagtttaatcggggcgtccgtgtttcccatcggattggtgctcgtcgttcttgccggcgcggagctgattacgggaaatatgatgtcggtatccatggcgctgttttccagaagaatatccgccggtgcattagtgaaaaattgggtgatcgtgacgttgatgaatcttgtcggcgcactgtttgtcgcttactttttcggacatgttgtcggattaaccgaaacaggaccttacttggaaaaaacaattgcggtcgcacaaggcaaattggatatgccgtttggaaaagtcattgtttcggcgatcggctgtaactggcttgtctgtttggccgtctggctttctttcggcgcagaagacggagccggaaaaatcgcgggtatatggtttccgattatggcgtttgtcgcaattggttttcagcacgttgtagccaatatgtttatcatcccggctgcgatatttgcaggctctttttcgtggggtgatctgattggcaatctcattccggcctttatcgggaatgtcatcggcggggcagtgtttgtcggccttatttattttattgcatattcaaaaaaagatcagaaaaagcaagggatgaaaagagtttcctgaggtaagaaagatgccggaaaacatggacaattgaagcggaatgccagcacattttccgtccaaatcttgaaaaaaatgtttacaaaatggaagctgatggatatacttacaaagtaagaaaaaagcaaagggaggttgaatcacatgacgacgttaaacggcaatcaaaatctacaattgaaccgattcagcctgtggaagagttcgtgtccttccttaacctctgcccgtcaagcacgttaatttcggagtatcaggacattcgcagctccccgcagggaaagaagcacagtcttcttttgtctgcggatttagtctgcccgcagcgcatatgaactttgctgcgggttattttcgcttgtgcggatattgaaagggggtgagcgataatgaccattaatcttttctttttaacactgaccatttcaaagcgttttaaaagtgcggaagagtatgaacgagaacagcaggtcgaagagttttataatgaagcgaaagaacgccagctgaaacatttttatatgaactaacggacacgaagggccaaaacggaggagaaggaggagatcatcatgttcagaattgaactgctgaatcattacacaatggagaaggaccaggtttagcgaggatgttgctgtcacgtcgcagacggcctgcataccatggtaaagaaagaaaaattggtaagcgggtgatagcatgcaaggcggtcagaacagaattccatccatcgggcacgggtatgcgtcaatgccccattcatttaaacacggctacggcaacccgtatcgccggcagagaatggcggcgctttcccggcagacaagatatatagcaccgtattattggtactagagcaggcggaaaacctacgttttccgtctttttttttatgaaaacaaatataaatttcaaataaatcgaaacgttcatgaagagaagtgcgtctagttagtacctcatactaatacgaggtaatattatttctgaataataaatcacaggaatggaaaagcgggtgttatacaatgttgcaacacacatcttcagcattaaaacgaatgcgcgcgaaatactttgctgcatcagaaccggcagagtcagtcattcagcaaatcttgatggacatacaggaatacgaccgcattttggaaatcgggaccggaaacggctcaatgtttaaacaaatcatcggacagcttgaaaagggcagtcttaaaagcatagaaacatcgaaacgtaaaatacggaaaacacagcgcgcaaaccgttcggttataaaagccgggctcggaaacattcagcaggggaggccggaaagcataccgttccgcgaccgcagttttcataaagtcttctcgttacatactgctgaaacagtcagcgattaccgcacggcatgtaaagaagtgtaccgcgttcttcaaattgacgggtgtttctatatggttttgaaaccttcgcggatgagtgaaaaggatgtgattgaggtgctctatgatcagcatttcagagacatttcagttgtcagcagagattcattccattttattactgccattaaatagaatatttcttgggaaataaaaagagctgcttaagtcactgcagctctttttgtgaaattgggcatatttccttatttttggttatttcacatatattttatattaaaaaaagtttttttcttatacaatggtaatcagatgaccgtacattttaaatattttgaacaaacggaatgaatattcattccgcatttagaaagggggatgaaatgacagcttcaaataaggttgaactcattatgaaagcgtcgcttactttgtttacagatagaggatttgacgccacgacgattccgatgattgccgctcaggccgatgtcggaaccggcacaatttaccgttactttgacagtaaagagacacttgtgaacgtactgtatcaggaaagtgcgcagcgttttatgaaaaaagtcaaaacggactttcaggggatatctgtaagagaagggtttcatcacctgttttattgtctgattgattttacgaaggaaagtgagtatgcattgttttttcttgaaacgaataaggacgcctactttctgaatgaaacgagccgtaagcttcttgatgaaataacacagatgcttgacgtcttttttcagcgcggcaagtctgaaggcgtgctccgcaatctgccgtccaatgtgctgatggggctgctgctcggggcatatctcaaactctatcagcttatccggacgggaagcgtcgaaataacaaaaccgtttctgaaagaattggaacaatgttcttgggatgccatcagaactcattaattattcgccgaaggaaggaagatcgatatgaaacagctaagcgctataccgcagccgaaaacatacggacctctgaaaaatctccctcacttggaaaaagaaaaactgtcacaatcgctctggaaaattgccgaagaatacggcccgatctttcgttttgaatttccgagctctgtcggggtcttcgtatcaggccgcgagctcgcggcagaagtctgtgatgaaaagcgatttgacaaaaatctcagcaaagccctgctgaaggtccgtgagtttggcggtgacggactatttacgagctggactcacgaaaagaattggcagaaagcgcatcggattttattgccgagcttcagccagaaggcgatgaaaggctatcattcaatgatgctggatattgccatgcagctcgtgcagaagtggagcagattaaatccgaatgaagaaattgacgttgccgaagatatgacgcgcctgacgctggatacaatcggcctgtgcggatttcattaccgctttaacagcttttaccgcgacacacagcatccttttatcacaagtatgcttcgtgcgctgcaggaggcaatgcgccaatcacaaagacacagcctgcaggacaagctgatgatcaaaacgagacatcagttccagcaggatattgaagagatgaattcgcttgtagaccggatcatcgctgagcggagggaaaatccggatgagaatctgtctgaccttttagcattgatgcttgaagcgaaagaccctgtaacaggggaaaggctggatgatgaaaatatccgttatcaaatcattacctttttgatcgctgggcatgaaaccacaagcgggctgctttcttttgcgatatactgcctgctgaaaaataaagataaattgaaaaaagccgttcaggaagccgagcgggtgctgacgggagagacccctgaatataagcagattcagcagctgacatatatccgcatggtgctaaacgagactttgcggctgtatccgactgccccggcattttctctgtacgcgaaagaagatacggttctcggcgggaaatatccgattgcgaagggacagccggtgacgattctgactccgcagctgcaccgggataaaagcgcgtggggagaagatgccgagttattccgtccggaaaggttcagcgatcccgcggccattccggctgatgcgtataagccgttcggaaacggacagcgcgcatgcatcgggatgcagtttgccctgcaggaagcgacaatggtgctcggccttgtcctgaaacactttgaactgattgatcatactgattatgagcttacgattaaagaagctctaaccattaagcccggtgattttaaaatccgtgtgaaaaacaaggacgtgtccaatcatcagcccgtacaaaaccataaagctgaaggcagcggtcacaaagaagaaacgaaagaaatcccgtcccacggaacgccgcttctcattctttacggatcaaatttaggaactgcggaaggaatcgcggaagagctggctgatatcggaagaagcaaaggattttcaactgaaaccggcccgctcgatgattatgccgggaaactgcctgtaaaaggcgcggtcgttattgttacggcttcttataacggggcgccgcctgataatgcggcgggttttgtgaaatggatggaaacccttgaagatcaggaattaaagggtgtttcttacgccgtcttcggctgcggagaccgcaactgggccgccacttaccaaaggatcccccgcctgatagacaaagtgcttgaagaaaaaggggcaaaacggctgacctctatcggggagggcgacaatgccgatgattttgagtacagtcaggaagtctgggaagactcattctggaaggacatcatgaaggcttttcatatagaggccgctccaaaacagacaaacaaatcacagctatcaatcgaatacgtaagtgaagcagccgagacgccgattgccaaaacgtacaaagcatttgaggcagaggtcatcacgaacaaagagcttcataccgaaagcagcaagcgctcagtccggcatattgagctgcgtctccctgaaacagaaacgtatcaggaaggagatcatctcggggtgcttccgcaaaacagcggggaactgatcagccgtgtcattcgccgattcggtcttgatccgaaccagcactttaagatcaagggccggcagctgcctcatctgccgatggaccggccggttaatgcgccggagcttttggcgtcctatgtagagctgcaggagccggcaacgagagcccagcttcgcgaacttgccgcacataccgtgtgcccgccgcaccaaaaagaattggagcatctttattctgatgatgcggcatataaagaaaacgtgctgaaaaaacgaatgaccatgctggacctgcttgaagattatcctgcatgtgaactgccgtttgagcgctttttagaacttctgccgtccttaaaggcgcgctattattcaatctcaagctcaccgaaggcagccagcggggagctcagtatcacagtcggcgttgtgacggctccggcatggagcggccgtggggaataccggggcgtggcttcgaactatttagccggattacaaaaaggcgattctgccgtctgtttcatccgctcgccgcagtcgggtttcgcattgcctgaaaatccgaaaacgcctctcattatggtcggagcaggcacaggaattgcgccgttcaggggatttatccaggcgcgggctgccgaaaaaatgtccggtaacagcctgggcgaagctcatttatacttcggctgcaggcatcctgaagaagacgatctgtacaaagatgaattcgaccatgcggagaaaaacggccttgtcaccgtgcatcgggcgtattccaggttaaatcaggactgtaaagtatatgtacaggatgttctgcttcgcgaggctgcacaaattattgcccttcttgaccaaggcggccatctctatatatgcggtgacggaagcaaaatggctccggctgtcgaaaatgtactgcttcaggcgtatgaaaaggtgcataacactgattcaaaagtttccttggagtggcttgaacagctgcaggcggaaggaagatatgcgaaagatgtttgggcaggtatgtaacagaagagtgagacaactgaagaatgttttttaattgaagaaagccggcacgatatttgaaatctactgaatcaaaaggaatagttatagggagtatcgtgccggccttatctttagtatcggacaaaaggcacaaatctttaatgtttttattgatttacatgcaggcggctatgtcccttttttctgaattccgccagaaataaaaccggataagacagcaatagcaaaaccgaaataaatgaaatgataccgatccaatgaaaatgcgtccaaaagaaaccgccgcaagaccctgccacgcttgaaccgatatagtatgcaagcagatataatgaagaggcttgcgcacgatgatcaccggctgcgcggccgacccaggcgcttgcgatcgaatgcgcgccgaaaaagccgaaggtaaagacggcaatccccgcgattttaagcgcaagctggggcaaaagtgtcaccgctgcgccggcaagcataacaaaaatcgcaatcttaatcattttcgcgcttccgaaaagatctgcttttttccccatatagaccgagctgaacgttcccgcgagatagacaataaaaataaaaccgatcacagtctgcgacaaatgataaggagccgccattaaatgaaagccgatataattatataatgtcacaaaactccccattaatataaatcccagagatattaacaaaagcagccgtttgcggtgcaggaccgctccgtattccttacatgccgattttacgcccgcatgccgctgagatgaatggcgcggagccggaagaaaacgccaaaacaaatagcttaatacaatagaaagaatgccgatgatggcaagcgccggccgccagccgaatacatcggtcagaagccccgttaacagcctgccgctcattcccccgatgcttgtgccgctgatatacaagcccatcatttttccgaggcccttcggatcaaactcctcgcctacatatgtcatagcgacagccggaacgcctgccaggaaaataccgagcagcgctctcatcgccaaaagcgcgggaaaagccggactgaacgctgttaatagacctaaaacagaagtagctgttaacgacagcaccattaatttttttctgccgaatccgtcagacaacgaagcggcggccaataatgaaaatgccaaaacggctgttgagatggataaagttaagctggcagccgcagcggaaatatgaaactcttccgaaaacaaaggcataagcggctgtgtcgtgtaaagcgtggcgaaggtcacaaagccgctgataaacagagccaagctggcctttctgtaagcctttgtatgaggctgaataaacgtcatgaatgtccctcttttctcactgttggttatatatgtatcgtacgcttttcatttcaatgtgtctaatttataataactatagaattaatgcgtgtaggttatgaagaaaggggagaaggagaaaatggagcttcatcaaattgacaacttcattgcggcggcaactcatcagcatttcacaaatgcggcaaaagaaagaatgatttctcagccggcattaagccgatcgattatcaggctcgaagaagaattaggcgcgccgttattttacagagagacaaaagccgtccggctgacaaggcacggagagcagttcttaataaaagcaaaacaagcgagacgagctttaaatgaaggcgttgaacaagtgaaaaagaatatgagcctggagcacggcgaaatatctgtatcttttcttcatacgctcgggctgcgcttaatgcctcagctgattgccgaatttaaaaagctatacccaaacgtgaccttccggctttatcaaggcgcaaatgaaacgcttcgcaaaatggtggaaacgggagatgcggatatctgtctcagctccccgccgcttcccagcgagcttttacaatggacagtgctggagaaagagcctctatatgcggtgctacctgagaaccacccgcttgcaggaaataaaagcattcaaatgaaagagatgcaggacgaggattttgtgggttttaaaccgggatacgggctgaggtatatgtttgatctgatgtgccgggatttgaatatacacccgcatctcgcatttgaaggagaggaagtgtcaaccatattaggactgaccgccgcgggtctgggggctgcagtgctgccgaaaaccgcggagcattcatactttccggtcgtttttctaccggttgcagattaccaatgcgaacgcaccatagcgttagcccagctgaaaaaccattcactctctcccgctgctgagcgttttaaacagtttgcacttgagtattacaaagcacgcaactgagcggtcattttattaaaatcgaagttgaaaataaagcagaaagaaatacaaaaacggaggaaaaccatggcgaaaaaaacagtgaaaacaaatgctgtccgtatcattgagcagcaaaacattccctatgagctattaggttacaaaacagaagggggacagcccgcagacggtctttctgtttcacaaaaaatcggatacgctgccgaatatgtttataaaaccttagtggcatctgcaggtactgatcgttattacgtctttgtcgttcccgttgcaaaagaactgaatctgaaaaaagctgcgaaggcggcaggtgagaagaaaatagaaatgattgccatgaaggaccttttgggagtaaccggctatatgcgcggcggctgctctccgatcggcatgaaaaaaaggtttccgacttttattgatagatccgctgaaacactggagtttatgattgtcagtgcggggaaaatcggaatgcagctgaaagcagcgcctcaagatttagccgaagcaagcggggcggtatttacagacattgtataaatgtccgatgaatctaatagaacacgtgtcaagggagaatgataatgataaaaagatatgaaaacttgaatggcgtgaagaatgaacatggattcagggacatgtggaaatggatgaaagaacgaagagaaaaaagtaaagacttaagcgagaacattccgaaagcggtcacaagggatgtccgtgatgttgccgtcaatcggacggaaaccgccataacatggatcggccattcttcgtttctgatccaaatacaggggcttaacataatgaccgaccctgtatgggcgcggaggatgggttttcaaaaacggctgacagagccgggatatgaattgagcgaactgcctgacattgatgccgtgctcatttcacacgggcattatgaccatcttgattttccgagtataaaaaaactgagaggaaacccggatttttacgtgcctgcgggattgaaaaagctgttcaacaaaaaaggccgcaaaaaggttcatgaaatgaattggtgggatcgttttgagatgcggggggtgaacatatcatttgttccggcccagcactggacacggagaacgctttgggataccgatacctctcattggggaggctgggtcatagaaagcaaaaacggcgagtccatctattttgcaggagatacaggctattttgaaggctttaaagaaatcggagagaggtttcgtattaaggcggctctgatgccgatcggagcatacgaaccggaatggtttatgcaagtgtcacatatcaatccggaagacgccgtgaaagcgtttttggagctgaaggctgacagcttcattcccatgcattacggggcattccggcttgctgatgatacaggcccggaagcattaagcagactgcacggcgagtgggatcggcttgcattacctcctgaaaacctgaaagcgttagcgcttggcgaaacattttggctgtaacagcaggttttcgctgccgacaccaatcgtttaaaaacggttggtgttttgacgtcaatcaaaggtgaattgtctctgtataaaacatgatttttccggaacctgcggtaaaaaacaaaactttttactcttttgtttcactataaaatgaaaacggtttcgtatgcgcagtatatttaacctatcacaattgctccagcagaaacggacaggaaggatagaaaaacagatgaaatacatgaattcaaggcagaaaaagattttgtatctgttgttatctgaacctgatgactacttagttgtgcaagatttcgcagacagggtccgctgttctgaaaaaacgatcaggaatgatttgaaaacgattgaagatttcctgaatgaacatgctcaagctcagctgatccgcaaaccgggattaggcgtctatttacatatatcggaacaggaaaggtcacggttaagccggcaaatttataatgagcactttacgtgcaggcacaagaccgatgaagaaagaatacttcacatcgcttatgatttattaatgaattcaaagcccatttccgcaaaagaaattgccgcacagcattttgtaaacagagcttccattaaaaaggatgtaagtgcggttgaagagtggctgaagcgatttgatctcacgctggtttctaaacagcggctcggcttaaagattgaaggggacgaaaaaaacaaaagaaaagcattggcgcgaatttcagatttgattgataatgcggaatttacaagccaatttataaaaagtaagtttttaagttatgaagcggactttgtgagaagagaaatcaagttattacaaaaaaaccattctatctattttacggatgaaacatttgaaagtttgctgctgcatacattgctgactatccgccgtatcaaaatgaaacagccggtcgccatttctgcaagacagctggacgcggtaaaaaagaagaaagaatatgaatggacactggcttgtttaaaacggcttgagccggtatttgccatccggtttcctgaggaagaagccgtctatttaactttacatataataggcgggaaagtccgctatccatcgcagcaagaaaagaagcttgatcttgaagattctgagctttccaaagtcgtcaggcatttgatcaatcgtgtttcagaattgcaaatgctggattttcataaagaccaggaactgatcaacggattgaacattcatctcgatccggtgttgaagcggctgagctatgatctctctgtttcaaaccccatgcttcacgacatcaaaaaaatgtacccttatttgtttcatcttatcattgacgttttagaagacatcaatcaaacatttgatctttatattcctgaagaagaggcggcctatttgacgctgcattttcaggcagcgatcgaacggctgcgccgaagcagtcataaccctaaaaggacgatcatcgtctgccatatgggcattggcatgtcgcaattgctgcggactaaaattgaacgcaaatttcatcacattacggtaaaagactgtatcgcaaaagcggagctgacagagtatatcaaaaagcataaagatatagatttcgtcatttctacgatagggcttggaaatgtaacgatccctcatattgtcgtatcaccgcttttggagtctgctgatgaaaagaagctcagcgcatttatgcaacagcttaatacatcacaccgccgggagcaaaaaacgtttaaaatgctgaacgacacgactccgtttctcgtttttttacagcaagagacagagcaccgttatcaggtcattgaaaagctggcgcaggctttgtatgaaaaaggctatgtagaaaaagagtatggcattcatgcagtaatgagagaaaaaatgtcggcgacaaatatcggggcgggtattgccatccctcacgcgaactctagatatataaaacaatcagccattgcaatcgccaccttaaaagagccgattgagtgggggacagaaaaggtgtcgctcgtttttatgcttgccgtcaaacacgaagatcaaaacaaggtaaagcaattattcagtgagctttcctatcttagcgagcagccggcatttattcaaaaactgacggaagaaaaaaatgtgatgacgtttttatcgtatttaaactattaaaagcagggaatggctccctgctttttttctgtttatagggaaaaatgccgttatttccggaacttatggtaaaaaaacgcgcttatcacaggctgatttcagtataaagttgagacaagatcttgaaattcagactgcaaaggaggatttatatgaaactgttagcgattacatcatgtccgaacggcattgcccatacgtatatggctgctgaaaatttacaaaaagcagccggcagattaggcgttgagatcaaagtggaaacccagggcggaatcggggtggaaaataggctgaccgaagaggaaatccgggaagcagacgcaatcattatcgcggcggaccgctcggtgaacaaagaccgattcgcgggaaaaaagctgctggctgtcggggttcaggaaggcatccgcaaaccggaagaattaattcaaaaagcgcttagcggtgaagtgccggtctatcaatctgtttcaaaagctgaatccgcaagtcagcagggcaaaaaacaaaacccgatttaccgtcatttaatgaacggcgtttcttttatggttcctttcattgtcgtcggcggattattgatagcggttgcattgacgcttggaggagaaaaaacaccaaaggggttagtcattccggacgagtctttttggaaaacgattgaacagatcggcagtgcttctttttcattcatgatcccgattttagccgggtacatcgcgttcagcatcgctgataagccgggtcttgtccccggaatgatcggcggatatattgcggcagccggcagcttttacgacagtgcaagcggcgcaggatttcttggaggaatcattgcgggatttttggcgggatatgcggcgcttggaattaaaaaatgtaaagttcctaaagcaattcagccgattatgccgattattattattccggtgtttgcctcactgatcgtcggtttggcgtttgtctttctgatcggcgcccccgtcgctcatattttcgcatcattaacggtttggcttgcgggaatgaaaggttcgagctcaattctcctggcattgattttaggagcgatgatctcctttgatatgggaggacccgtaaacaaggtggcctttcttttcggatcggcaatgatcggagaaggaaattatgaaattatgggcccgattgccgtttccatttgtataccgccgatagggcttgggattgcaacgtttttaggaaaaagaaaattcgccgccgcagaaagagaaatgggaaaagcatcatttacgatgggccttttcggtatcacggaaggagccattccatttgcggcccaagacccccttcgtgtgatcccgagtattatggcgggttctatgaccggctcggtgatagcgatgatcggccatgtgggggacagagtggcacacggcggccccatcgttgctgtacttggagcagtagatcatgtactgatgttttttatcgctgtaacagcaggctctcttgtcaccgctctgttggttaatgtactgaagaaagatatggcgaaatcccccgcgcccggcgaggtgctgccgtctgccgcaccaaatgaagctgcagcggcaaaagaaacaaaggaaccatctcaggctgacagccgaaaagccgggatgaccgaaatcaaaaaactgactgacattatcagtacggacttgattgaaccgcatttatccggcgaaacgagggatgacattatcgatgaaatgatcgagaaaatgtcccgtaaaggtatgctgctgtctgacagcggatttaagcaggccattttgagccgggaacagcagggaaccacggcgataggtatgaatatcgccattccgcacggaaagtctgaaaccgtcaaaacgccgggtgtcgcattcggaataaggcgttcgggtgttgactggaacagccttgatggttctgatgcaaaactgatttttatgattgccgtaccgaaggaaagcggcggaaatcagcatctgaaaatattgcagatgttatcccgaaaactgatggatgacagctatcgggaaaggctgctctccgttcagacaaaagaagaggcgtatgagcttctggaagaaatcgaataaagcgggggatgatcatgtctactgaaccgatatttttcaatccggttttcaaagaaaggatttggggaggcgccgccctgcgtgattttcactataatattccgtccgagcggacaggggagtgctgggccttcgccgctcatcaaaatggacagagcacagttcgaaacggcatgtataaaggatgtacgcttggtaaattgtgggaacatcacagagatttattcggaaaccttgaaggagatcgttttcctcttcttacaaaaattttggatgcggaccaagacctgtccgttcaggtgcatccgaatgatgactttgccaaaatgcatgaaaacggggaacttggaaaaaccgaatgctggtatatcattgattgtggaaaagatgcggagatcattttcggccacaacgcaacaacaaaagaagaactgatatccatgattgagcgcggagaatgggacgggctcctgaacagagttaaggtaaagccgggagatttcttctttgtcccaagcggcaccgttcacgcgattggaaagggcacacttattttagagacgcagcaaaattcagatacgacttacagattgtatgattacggaagaaaagatgcggacggcaggctgcgcgagctccatttggaaaaaagtatagaagtgacagacgttccatctgtccgtgaacggccgaccgttcaatataaacaaacagatgatctgctggcagctgttttaatagaatgtccttatttttcagtcgaaaaatgggatgtaaaaggtgaagtgaatttattccagaatcatcccttccttcttgtcagcgtgatcgaaggagacggaataatgattgcaggcgggcatgaacatccctttagaaaaggagatcatattctcctgccttccggtttgggagaatataaactggcgggccatgcaaattgtattgtgtctcatctgtgatcttcaaaacccttctctggcatcagagaagggtttctcgttacttttacaaaaaggccgaaatttccgtggttcgttcctgaatttattctctcaatttgtatatctcccgagccatcgattcaagtatgtacatcgcggggatttgggtggtgatattcgcattttcaacccattcttccgtcacgtaatatgaaatattcacatcggacattttggcaatggttgaatgtttatgatttgtaatactgatgacccggcttccttcttgtttcagctgattcagatgagtcaccgtagaatctccttcacctgaaaccgataatgcgatcgtgatgctgttatggcggaaatgggaatgggccggaaagtaaggatctttaatatacattgaaagtttccctaagcacgaaaaatatctggctccgtattcggcgagaattcctgaactacccactccgataaaaatgacgctttctgcatcggctgcaagggctgctgcttccttcagcttttcttccatccctccgcttactgttctttcaaaaaactcggcaacggaatgatggggactctttaaaatcgtttttttatttgcctccgcatacattttcagcttcaccttaaactctgaaaacccttcacagtttatttttttgcagaaacgtaaaatagaagccgtagatacatgggtttcatttgccaattcacggatgcgcatatagacgactttctcgctgttttgggagatgtagttgtataaagaagtttcaagctcgttaaatgaagcaatcatttcgtgtgtgaacatgcagggggattctcctttttatgagaatggtgaatgtacatctcatcgtaacatatcatttttaaaagaaacatagtgttattttcatgtgacatatcactttttgtgtcattcaaaacaagacgtcagccaatgatttacggtcaaaacaactgcggatataattcgttcatacgctttatgcatgatctcttcaagggccgctgacaaaagcggccgaaaaaaggaggacaatatgagtatcaaactgatagcggttgatatggacggaacgtttttgaatgatgaaatggcatataacgaagagcgttttatgaatcagtatcgtgaattaaaagcgcggggaattaaatttgccgtagcaagcggaaaccaatatgcgcagcttacatccttctttccggaaatcaaaagtgaaatcgctttcgttgccgagaatggcgctttcgtcgtgaatgccggagaagaagtattcgtgggtaacatgtctgaagacactataaaagaagtgatccgtgctttagagcagtatgaggtgaaaaacgtcattgtctgcggaaaaaaaagcgcgtatattcatgaaaatgccagtgaagatgaatatctgcatgccagtaagtattattatgtgttaaaaagggtgccgcattttgaaaacatcgatgatgacattttaaaattttccatcagctttcccgccgaacattgttccgcacttctgagccatttaaaaaacgcaatcgggtctttcgtcacgcctgtatcaagcgggcacggtgacatagatctgatcataccggggcttcataaagcaagcgggattaagcttctccagaaacaatgggggataaatgctgaagaatgcgcggccttcggagacagcggcaatgatttggagatggtgtccgccgtgaaatacggagtcgccatggataatgcgcaggaaagcattaaacaggccgcagcgcatatcacgcaatcaaacaatgaggaaggggtcttaaacgcgattgattccattctcaaatgtgaaaaaccttttgtctgaaaaagacattttaactgcggaggtgctgaacgatgattaaattagtgattacggatttagacggcacatttttaaataatcaaggcgattttgacagaacgttatttgaaaagacaaaaagagtaatggaggaacagcatgtcgctttcgccatctgcaccgggaaacagtgtgaaagggtggaagccttattcggagaagacgcgaaagatttttggattttaggagacagtgctgcacgtatgaaaaagaacggcaagttcgtatatgaatctttaatcagcaataaagccggactgtcaattataggcgctttagaaaaaatcagctgcgggcacaccattatcgcgtgcacaaaaaaaggcgcgatcgtaaaagaaaatctgtctgaaagtgaaatgaaatatgtaaatgcctcttatgcacatgtaacgaaaataactgattttactgagataaaagacgattttatcaagattacggttcatgcccccgacgccaactgtccggaaacgagagaaaagctgcatgaattttttcaccaattatatatcgtagcatcagaagatacctggatggatatatcaaatatcggaatacataaaggatcaacagtacaagaactgcagcgattattaggggtttcggcagatgaaacaatggcattcggagacggccgcaatgacaaagaattgatggaagcggcatcctacagctttgcggttaagaacgccattgacgaaataaaagatgcggcgcactttgtcatcaaatcaaatgacgaaagcaccgtcatgcacacgattatgagaatattagcgctgcaaaaacaatgatgggctaaaatcaatgcggcatgacttactagggatagaaaaagcgggctatcctcagactttaattcacttctggtttttctaaaatatgttaaaaatgaataaatatctatatttgactcgatggtattggtataatatgtataaaatgaatgaagcggtgtaatatcaagatgaaaaaaatcacttcatatcagacaaaaagtcggaactgcctcgttttgaaattgggaggtgtttgtattagcccgctgttgagccccgcgtatatcattcttatttttcttccggcagcttcttttctgttagggattttaggatatttcatctttaaaaaagtatggatgatggttgttattgtcttcattttgtccttgatattcatgtttattgtaataggcgccgaaccgacatttttcatttgggtggctatgatgacggggagctgttttgtctccggttcaatcactaagacgatatggactttcgcaaagaaaaaatattagacagaagaaccctgtttgaacagctatcctttttttgtcgattgaagaaaaagaagtatagagttatccgttatgttcttatatttttgtctgttgttgtcagatcgggctttctgttgaaaatgtctgtctatcattttgttcttttttaactaaacggagcactataattgaactgtagatacatagaaaaataaaaaaggataaggaggatttttatgtttcaaaccttagaccattttttgaaatcttgggaattcgaagccgatgcgacacaaaaactgctgaatcatctgactgatgaatcacttaaacaagaaatcacttcagaacattggactttaggccgtattgcttggcatactgtcgcggcgattcacatcattacctcaaacacagatttaacgtttcatgctcctgctgaagattatcctgttcctgcgtcggcgcggtttattgctgagagttatcatcaagccagtaatgcatttgtacaggcgttaaaaacgcaatggactgacgatacacttcaagaatgtgtcaactttattggtcagcaattgccaaatggttcacttttgatgtttttaattcaacatcaaaaccatcatcgaggacaaatgactgtccttatgagacaagcaggtttacctgttccgggtatttacggtccggcaaaagaggaatggattaaattcggtttggaagctccgaaataggatattgttgtaagggctcgaatgaatagatgataccaatcgatgttggtatcttttttgttttagtcttagagtgattaaaccggtatccatgacatgcagacgaatcaacagttcaatagatgtaaattaaggtcaataaatgcagaaaggtgattatgatgataactaaaatgacgcgattcaatatgaaagacttcaataaaccaaacgaacctttcgtagtttcagggagaatcatcccttcatttgaggacaatgtttggacatatacagaggagaaatttgctgagccttatgtcaaaaaatatgacgatgaagacattgatgtcagttatattgaagaagaggataaagttgtctttttttattacgcagagaacgactgtgtcggccggagtaagcttcgttctaattggaatggatacgcactgattgaagacattgccgttgcggaagattatagaaaaaatggtgtcgggacggctttattgcataaagcgattgagtgggcaaaggagaatcatttatgcggtcttatgcttgaaacacaagatattaatgtttcagcttgtcatttttatgccaaaaataactttgtcataggagcggtcgatacaatgctttattccaatttttcaacagcaaatgaaattgcggttttttggtactgtaaattttaaatataatagtatttgatgtttcgtcatttagcgggtgtgtgtcgcgaagtattcaaaacatctgcttgaggatttataataaggtatatcaatcaatgcagggggagttatggatgaagtgcaaaaaaatgaacagggtacaattaaaagagggaagcgtatcaatggccctataaactgcgtctgccctcattaatggagggaaagttgtgaatacgccttattcacagtcagctttacggcacaaccaagtgttcatttggctttgtgttctgtcatttttcagcgtattaaatgaaatggttttgaacgtctcgttacctgatatcgccaacgattttcataaactgccagcgagtgcaaactgggtgaacacggcctttatgttaactttttccatcggaactgctctgtatgggaagttatcagatcagctgggcatcaaaaagctgctcctatttggaattatggtaaatggcttcggatcgatcattggatttgtcggacactctttctttcctgtacttattctggcccgatttattcaaggggctggtgcagccgcattcccggctcttgtgatggttgcagtagtacgctatattccgaaagaaaacaggggtaaagcatttggtctgatcgggtcgctggtggcaatgggggaaggtgccggaccagctattggcggaatgatcgctcattatattcattggtcatatttgctgcttattccaacagcaacagttatcaccgttccattcttgatgaaactgctggaaaaggaagaaagaatcagcgggcgctttgatatggcgggaattatattaatatctgcaggcatcgtatttattctgctgtttacaacgtcatatagactatcttttctgatcatcagtattctagctttcctgatatttgtgaaacatattaggaaaactcaagatccctttgttgaccctgcactggggaaaaatgtcttgtttatgatgggcgtcctttgcggaggcctgatattcggcactgctgcaggatttgtgtctatggttccttatatgatgaaagatgttcaccatttaagtactgcggcaattggaagcgggattatgtttcccggaacgatgagcgtcatcatcttcggttacattggaggatggcttgttgatcggaaaggttctttatatgtgctgaccattgggattgcattgatgtctttcagctttttaatcgctgccttttttatagatgcgacaccatggctcatgaccgttatcatcgtttttgtttttggggggctctccttcacaaaaacggttatatctacaattgtgtctggcagtttgaaacaaaaggaagccggcgccggaatgagtctgcttaattttacgagctttttatcagagggaacgggtatttcgattgcaggcggtttattatcgacccgcttgctggatcaaaggctgctgcctgttaacgctgatcattccgcttatttgtacagtaatatgctcattctttttgcaggaatcatcgttatgagctggctgttaaccatgaatgtctataaacgttcgcaaagaaatgactaaaaagggaaaaggatcaaacttgataaaagttttgatcctttttttgaggagcttccttattccgaaaccttttgtcgatcaatgaaaggggagttaaagtgaattacatttataagaaaaaggaaaagaaaaatggaaattgtatcatttcaatcagagataaatgggagaatgcacttattgagtttgaacaaaaaaataatcaaattgagatcatgatcaattatcgtaacgagaaaacaaccaagttttcactgccaatcgagacttttgagaaagtgtatgaggatattaaaataggccggggagaaagttaatcattctttttgaaaatgaccatgatgttcgtaagcagtatggttttaacacgcatttggatttccctggcaaaataaaggtttttgggaatttatgttaaaataatagtaagaaccttgggcagcggacagggagtttcgttgcttcataaggagagggaactatgaataatattcacatactgggagcctccggagtcggaacttcaacactgggtgttgcattatcaaagcatttgcctcatacgcatcttgataccgatgattactattggacagataaattcactaagaaaagagaaattcctgaaagaagaaagttgcttgaaaaagacttgacaataaatgagaaatggattctttctggcgcagtgtgcggctggggcgatgatctaaaaagttattttgaccttgtcatcttcttatggattccgcaagatatacggcttgagagattaaggcatagggaatttcagcgttatggaaacgaagtgttagccggcggcagtaaatatgaacaatcaaaaacatttttagagtgggcttctttatatgataaggccggaatggaagttcgaagcaaagctttacacgaacattggatggcggatttatcttgtccattgctgaaaattgaaggagattactcagtcaatgaaagagttgatcgtgtcttggattatctgaattctaattaaactaacggatggagataactgaaaaaccaaaattcaaagacagttccggccattttaacggagctgtttttttataccgctttcagtttctctgttgtgaagtgatttattttcggcagcatcccacaatagagaagtgatttgttcttcattaagttctccgttggagtatttctctaaaattcgtataaatcgttcatcacctaatcaattatttctttgtttatttttattctccatctcattttcagaccgaattaaagccctctcataacgagaagggctttccacaatatatttttagaattttttcgatccaaacaaatatctataaaaaagataccggcaactttctgcggcatctcgcagtgttcaattgtttagtgctttttttcataatctttacaaatctgaaaaagtcatcatccggcaggggcttgtcatcttcgcgtccattgcgatgcatatgcggatcagagtgatgttcattgtagaactctacgatatggaatccgcacttattcacatagaagttgatatttcgcttttcgaaataaggtgtcacggtttcccaaagcacagtatccggatactgtgcttctatggctttccaagcagaaagaccaatcccctggctgtgatgttctggagatacatagaataaatctagcgaattatgatgtctttcgctgttgatacgtactactgcaccacctaccttcttaccatcccgaagaatatgataaacgactgctccgggagcgtcgaaagattcctgaacatcattgtccgatggaatcggtccatcttcgcaatcaccgaacgtttcaatcacggcgatcgcaaaggcttcttgtaatttttttttgaattctggcagatcagattcctttgctggttccagaataacttttggttccttttttgtcttcatgattgctcactccttcagttgctgaaataacgagttcagtcgttcagtaaaacattccagctgctctgccgctttttcttccgcggtaaatttggcgttaaaatacttcaaaagctttctcctgtctttttgtatgatgtctttttctttgttttcttaaaaaacaagctgcatgtccttatttactatcgttcactgccgtattaagtgtggtacgcgggatttgccatcattctcaaacttttcctgcgaaaagttgcaaaaatagtcgaatgtggcgcctttgcctatgaacatgcgtaaaagattcaaagattcgatcatgagcaatgcacattgagtaaactccggtgaatttattagcccaaagaagcctaaatgatataaaaataactagtatatatatcaaatctgtccgtttaatgcccacttctcaacatgaagtcatgcaatctgtgcaaaggggttatttcggaattgatttttccgaatgcatcggagtcgctttgggacttccgtttactttgccgtacgtcagcttgcgccatatcaattccatcggaccgtacttaaaccgtttcaaccacaatgtactaaagctcataagcacgaagtacacggccagactgaacatgaacgtgccggcggattgaatatgatccgcaagcccgaatccgtaccggaggaacagaactgttccaatgatagagtgaagcagataacaggtcaatgacatccgtccgactttggtgaatatcatcatagggcctcgcagctgaggaacgtacagaaacagcattgcaaaagtgctcatataaaacatacttccggttaagccgccattttgacccaagacagaggaaatgtccttccacagcatattctcagaaagattagacatgtctagtaatatacttctttgtgttattagaaaagcgattgtgctaatgatccagatacgcttccatatgaactttttcgcttccatgtctttgaaaaattccatcttaacaaagtacacgcccagcaaaaacatgagaaacatggaatagatcatagagaaagagctagcagccatcgtgaccatatctgtccaccgggtgctgatggattccatgtaggtaaggcttgtgtggctaaacaaagtaaactctgaaaaattcgggttttttgaccctgcagtattgatgacattgtacaacattgtgaaaacgggaatcaggaattgaaacacgataagtgcgataatccatctaagaaccgttttggccgtgcgtttatagaaagcgagtaacaggaagccgcttacggcgtaaaaggtcaatatgtcaccgacccaaacaaatgtgatgtgcaaaatgccaaaccccaacaggatagataacctgcgggcaaacagcttgttgggactatctaccttctgtgcggctcgatccataaagatcataaacccaactccgaacaagaaggagaataatgtaacgaatttcccttcggcaaaccaggaaaccagattgtgcaggaggtcaccggaggccatttcgaatccctttactgaatctacgatcagaaaatagttgacaataataatgccaagcaaggcaaatccacgtacgatatccagaaaatgaacccgttcccgcagactcactggttgcccgcgttcttctttttgtacaatcatatcaatactcctttcccatttaccattgcaatgtgcagtgcggatctgaaaaactcgagccttacaatggataaatataaagacagaatcttaacaatttatgaaggttcatcattttttttaaaatgtgacaaaattgtggcggacatcagctttcataaactgttaagatttacgtagtatcttataacgtacgttacttatgaatgatatatagtaaggtgacagaaataacatcaagaatcatgaggtgaaagaggcatgacccatcgaatattagtcgtagaggatgatcatgatattggtgatcttttggaggaatcccttatgcgagcaggctacgaggtgctaagagccaaggatggaaagcgagcattgcaacttgtgaatgattcgctcgatttggttattttggatattatgatgccaggcatttctggaatcgaaacctgtcagcacatcagggaaacctctaacgtcccaattctgtttctgacggccagatcgagtacactcgataaaactgagggattactcgccggcggcgatgattatatgactaaacccttctcggaagaggaacttcacgctagagtgattgcccaattacgcagatatacaatctatcaggaaaagaaggaacaggaagaaacatttcttatcgggggcaaactgagagtgagcgaagaatttaatgaggtttggaaagaggagcagcaaatcaagctgtcagatctggaatatcgtatcctgaaactgctgatgagcaaacgcaacaaaatattttctgctcaaaatatatatgagagtgtgtggggacagccttacttttactgttctaacaatacggtgatggtgcatattcggaaactgcgctccaaaattgaggatgatccggcacgtccggtttatataaaaactgaatggggaagaggatatcgatttggcacatcgtaaattcacgctaaccaaaaaactggctttgctgatcatggttgctgcgattgtgagcggtgtaatctttctgacgttgcaaaagattacagatgatctgatcgagggatatctgagttcggatgagtattatcacaaggagtcagcgagatacattcaaaaattcagtcagtacgtttcagaaaatgggttgtctacatcggatagaaaagcgtttggcgagtgggtcaaaaaagaaaattacattaacctcaccatatttaaggatcaggagctgcaatatgattccgtttattccgaatcggattatggaaaggaaaagctgactcagtacgctcaaaatcattcacatcctgtcaagttcagcgatggtgaaggacgagtcattatcgacggtttctactcttcccgatattatgatctggcctttacattggatttgctcggtgcaaccctcatctttttaatcattgttctcttgggcattcgccaaagtcttcgctaccttaaaacgcttcaccaagagattcatattcttgaagggggccagctggactacgagatgacgataaaagggcatgatgaattagcgatgattgcaaagagcattgaggatctgcggaaagctttcttggacaaacttaaagcgatcgaggaattgcaagcagagagccgcagcctggttaccgaaatgtcgcacgatatgcgcacaccgctgacgtcgctgatcatgaatctggagtttgccaaaaaagaaggaggcgaagcgggtacaagcaaagatcgttatgtagccaatgcttatggtaaagcactgcaattaaaaaacttgtctgacaatctgtttgcgtatttcctgctgaataaggaacatggggccgacctggagaccgttgcagtgaaagaagtgatctacgatctaatatcagatcagattgctatccttcatcaggagcatttccgggtccatatttcaggcgagctgccggaaacctatattaacgtgaatttggaggagcttggtcgtgtatttgataatgtgatgtcaaacttatttaaatacgcagatccggaagaagaaatcagcatcacgtttgtatcggatcaagaaatatttgagattcatattagcaatacgattaaacttgcggatgtaacaccggaaagcaacggactcggtgaaagaagcattgcgcgaatgatgtcccgcatgcaggggcagtttcacagtatacaaaagaattccaagtactgcatcgtgctgcgattttggaacagaaagatgtaggctgcgaatcaaaacgacgaaaatattgaaataggagacaacaagatgagattttccaacaatttcaaaaaggcaccttacctgttacaagcgcttctcaatgtctgcctgttcttcctggccatagccttaagcggacttctgatcagcgagacatggtacattgtgcaattcgtatacaagtcactgttcaacaaagtggacagctattatgagatgcttggggaactgcttatattcttcatgtactttgagttcattgctttgattatcaaatacttcaaatcagactttcatttcccgcttcgctactttatttatattggcatcacggctgtcattcgtttgataatcatcgatcatgatcaggcgatctcaacgttctggtgggcgatggccattcttgcaatgatttgtgcattctttattgtcaatagacgaaattctgttgttgaacattaataaattagttcactttataccgatacgccactgaaatgtcctatgacttacttgaatactaaataggtgtaaaaagtggttattcatacggattgaaaaagaagaacacgcagcagactcacttgctcttgtttggggcaagtgttgacaaccccattactggtttaattaaaagaaggggtataaaacctgtatcaatggtgttactcgatatctgcgacaggttttatatgcaggtaactaatattcctatatatgtaacattgcattttttatgatgcaatagttcactctatttctgctttcaatttttcgaaccactctaaattaaccaagtgatgtgaacgggaattttcattcatacggcgaaagtaattgattgtgccgggaatttcttgagtgatggacaggtattcgtcaaggagctcgattcgagttttagtctgatcgatttgtgattggatcagatccagtaatttatttttgtcgaattcatcggcaaagagtaacgccccataaaattgcaggttcacatattccgatttggtgccgtatttgatcattaatttttcgaattctgcccttcccgaatctgtgactttaaagttacggatttcacgcccgccggttgagggtttctgctgaatctgttcaatcaaacacttttcttcaagttgctgcagattgtaataaaatgaacctttcgtgaagttaacgatgtacttgtaatgacgtttttccattaaggccagaagttcatagccgtgagctccggggttttggatgagcaagccaaggataagtaagggaatcatggtttcatcaccttcgccatccgcgcttcaaattccgcgtacgtgattttacccgaagccaaatccatactatgaaggtaaatctgttctgttttagaatagtcaccattcactttcagtgattgctcctctcccgaaatgggtttcaggatatgatgctttttcgaaaaagcctcgaagtagcggtaaccgaatttgcgttgtgaagctgcgtctaaatgaatgccatcaggattcgcagtcaaacctgttgcagtaacaaaataacaattctgttgttcattagcaaaacgcagcaattgttcattaacctgtcgaaattcagtcgcgtgctgtccaaaaccagtcttcccaagaaagtcaccaagccctccaataatcaacggtacctcatcaagttccaactcgtttcttagcgtcccgatgataagagttaatttctcgtaataagtttcatgcagcgaacgataactgtcactctcaccttggtgccaaaggattccgcaaatttgactggatcggagggcgaagcgggtttcggacaaagcatgctgaaaaaggatgccttccggatgccagtcattcaatgaactgccaccttccgcacacgggatcaagccaatttcttcatcgggatgagctttcgaccatgcatctgcaaaagatgccgccaggccaacgccggaaaccggacggtcgtaattaatcggctctgtcatcatctgccactgtccattgcgcagcatttttattttttcattatagatagggtctacttcattcaaaaatccacggcccgccatattcgactgccccaacattaaaaaagactttatcatctaatttttcacttctttacatcaatattttagtctaattagactatagtcaattcagcttgtcttgtaaagtttcaactaggttttattagtatgtatgaaaagcgttcctgtggcagctacactcgacctgcctatacataaaaacttagggttatgcctggataggctcaattccagcttgggtacaaagggtacatacagcctgctttgcgaacaggccaatataagtctatcaattgcataccgattcatgaaggcgaattgcagaagtggaatccgctgattgaggagacgagatcgattttgaaaagcgtgaattcagacgtagtgattggttatgcagcttattttgagttgataaatggcttccgaaaaacagtgtactggacaaaggtacaagtagaaaagcacaaaaagaaattcagtaagtctgatgttggatggaaaaatgactgggatgcgatggcaactaagttttcgagccttcaaacaaagaaaatacagaaaaccaagcgtgcgagaagccgatccttttgacggcaagcctgttcaagcttcaacttttattcgaatggttcaagacatgccaacgattttaagagttgcgctgactaaggatcaaaagtctgttccatcaattagtacagttaacttaagcacaaaagaagtaattgctgaagttaacattacctatgacacacttgaaaacaacatcgaacaagaagtcgcatctgtatgcgacttctatcattttctaattaatagaaagtaaccataagaaaaaatttaaggacttgcagccctatggccgtataaacaaatttaatccctcataatatgtcatcaaacttagcaatatggattctaatttaggagtttaagagcgattgatgtgttcataaatgtctttcacatctaccggacagtgggtgagtaaaatacgtcactatgcatatgctgtattttttcccagttggcgggattggttgtatcaaaagagcggtgctccataatggcctgatatagggcggttttttgttccaaatgggcaatgtgctgtttggcttcttcgagctgggcgagcgcatcttctttatgctccatcatgagtgtgtaccgttgtggaatggtcgaatctccttcaagacagagattcacgtacgttttaatgacttcaatcggcataccggattgcctgaggcatttgacgccaaacagccagttgattgattcttcatcgaacaaacggatattgtttttattgcgctgtacgctcggcaccaggcctttatccgtgtaaaagcgcaccgcatgctcagtgagtccggttatcatcgctgcttctttgactgtatgcatgggtaatcctcctttaaaaattttttaaaaaagtgcttgccttcgtgttacacgaagataataagcttattataacgcaaaccagccgcagcggaattcattctgcagtgcccgattttcgggatgcgtgccgtttgtcgttctacatttgaacaataggaggaattacaatgcaaaccgtaacattaaacaatggagtgaaaatgccaattatcggcttcggtgtataccaagtccccgatgctcaagaatgtgaaaacgcagtatatgaagcactgatggccggttatcgcctgattgacactgcttccggttacctaaatgaggaggcagtcggacgtgcaatcaagcggagcggcgtatcgcgtgaggagctgttcattacgaccaagctctggattcaggatgccggctatgaaagagccaaggcggcattttccaaatctttaaataagctgcagctggattatcttgatttataccttattcatcagccatacggcgattactacggcgcttggcgcgcgatggaggatctgtaccgcgaaggaaaaatcagggcaatcggagtcagtaacttccatcccgaccgtctaatggatctgatcatgcataatgaaatcgtgccagccgtcaatcaagtcgaaacgcatccattctgccagcaaaaagaaagtgctgcttttatgaaagagcagggagttcaacacgagtcatgggcaccgttcgctgaaggacgcaataacatgttcagcaacgacgtgttgtcttccattgcggaaaaacacaataaatccgtcgcccaggtcgtgctgcgttggcttgttcagcgtgaagtcgttacgattccaaaatcggtgcgcaaagaacggattgtcgaaaactttgacatttttgattttgagttaagtttagaggatattgaaaaaatttccacgcttgataaaggagaaagtcttttcgggtcgcaccaagatccggaaattgtaaaatcgataggcgccatgaaattcgatctgtaagctttgtctaataaaacagttaagtttaatgaacttaaaaggttaatcccatggattacacagaggatatcgatactacaacttagggattagaaccttatcgggtatgaatattattcgaaaatttccaagtttgttcataaggaagggttaatgctaaaaagactgcgtgcaacttacattttaacggaagaacaatttgatgagatggttaaaccagaaaatctgaaacctaatatttgaatcttttaagataaaaactagttactaatcagtaactagtttttctttcagccagatcgagatctgcataaagaaagcagggactgaagtatgcctgtgaaggattttctgaggagctttttagagcgtccggcgttgaatcgtttgagagaggacgcaagttaaggacttataagtcaagtcatttgataccaaaatgcagtaacgaatgagaaaaatgattttcataactgtcacatctctttttctatattctgactttattgaatctgagtcaccggtggatattatgccggctgaagtgatttccgtttcatctattgaaataaggcttaatgaaaatgacaaattaataatacctgctgatttgattattattcctaaacggttgcgctctggagaaggtgaagaactgaaaatgggtgagaatttgatggttgtctccttaaaaggcgggcaatcattttttattctcgataaaatttaatgataataatcctgaaaaaataaataattgtaaagaaataatctatcctatagaataactataatattttgaaaatttcatccgaggtgggttatgaaaactattggtcttattggcggaatgagttgggaatcttcagctgagtattatcgaattatcaatgaagaaataaaaaagaagttaggagggcttcactcggcaaaatgccttttatacagtgttgattttaaggaaattgaacattatcaatccataggagcttgggataaagcaggtgaagctttaggtcaagttgcaagatcattagaaaaagcaggtgcagattttattgtaatatgtacaaatactatgcataaagttcttggatatatccaagaaatgatcactatacctattttgcatattgccgatgcaactgcagaacaaattattagacaagacattcgctcagtaggattgctaggtactaaatatacgatggaacaagatttttataaatcacgtattgcgtctcatgatattaatgtcattgttcctgatgatgatgaaagggaattaataaataatattatttatcaagaactgtgtctgggtgaaattaaacagtcttccaaaaacatttataagaagatcataaataatttggtggatagaggagcagaaggaatcattcttggatgcactgaaattggactattagtaaaggcagaggattcaaaagtgccattatttgatacgactttaatccatgctcaaaaagcagtaaataaatccctttcgatttcttcttagaatgattatttcttatattttaaaaccgctctttaggagcggtttttattatggttcattcaatcaataaatggaggaacgttataggagtgatcttatcatgaccctttcctcagaaattgaatttgatgatattgaagatgacagcgaagtcatagggacctctcaaacctacaaaatagattttgaaaatggccgtatcacaaatgaattcatcacaggccttgacgcgattaaacagtttgtatatttgtcccttcacactgagcgctacgcatattctgtttatagtcatgattgaaaaagataaaatagaaaaagccggaatgtcagatccggctttttgctcactttcccttcttcttccgcttctccttttccgcccggtaaaactcatgaaacatcttcatcaatgcgcgtttttcaatccgcgacacataactccttgaaatgccgagctcctttgcgatctcgcgctgcgttttttctttttttaaatcaaggccgaagcggccgacgatgacttctttttcgcggtcgtctaaaatatcgatatattttttgaccttttcaagttccatgttgagctgaatggtgtcgatcacatcttcgctttccgacttgagaacatcaatcaggcttatttcattcccttctttatcctggccgatcgggtcatgaagggagacgtcttttttcgtttttttcaatgcgcgcagatgcattaaaatctcattctcaatacatcgtgcggcatatgtggcaagcttcgttccttttccggctgagtagctttcaattcctttgatcagcccgattgtaccgatggagatcagatcttctgcgtcttctcccgtgttttcgaatttttttacaatatgggcgactaaacggagattatgttcgatcagcatattgcgggcgtgttcatctccttcggccataaggtctaagtattttttctcctcattatttgagagcggttgtggaaaggcattatttttcacgtatgatactaaaaacacgagttctttcacaataaacccgagcgctgcaaaaacacctgtcaccatcctcacctccacaaagttatgtaggcaaaagcctatatgtaactgtatgtggcagtcaggctgtttgtgtctgtacagggaaattaatcaaaggcaggttttatttcttacagcctcttgattttttctgattgagcctgtatattgttaaaaaaagtaagggtgaaaagaatataacgaaaagcgctgaagagacgagtagacagatatcattcatgacagagagctccgggagctgtgaaggagtatgaatggatgtgttgaaacaaacctcttagcttcgcatcggaatcatgaaaaacaaggatgatgcggcggatactcctgttaccgagtaagctttgtacccggcttaggccggcaccaaaccgaattgaggtggcatagcgggctgtttcccgtcctcaagactttattgtcttgagggcgttttttatttctaagggagggataagatgaaaaacctgaagtcttggctgtacccgatgcttctgttaaccggaatcgggatagcaaatattggtgaatggatttattttttgtctcttaatcttattgtcttaaaagaaacggggtctgcttttgcggtttccatcctttatttaatcagacctgcggctgttttgatgacaaatgggtgggcgggcagcatcatcgaccggtgtaacaaacggaatatgatgatgtcgcttgatttcatccgggctgcattcattgccgttctgccgctgatgtttactgcacggtctttattttccgtttattgtatcgtgtttttgattcaaatggccaatgcgatgtttcgtccgtgttccatggcatacgtgacgatgcttatcccggctgaaaggagaaaacgattcaattcactaagggctttgtcggaatcaggggcttttctcctcgggccggctgcggccgggctgctttttatcgccggcacgccgatttttgcgatttgggtgaatgcgggggctttagtgctgtccggtttcatcacgatgatgctgccgagccttgaaaatgagcctcacgtacattctcccagacagaagctttctttggcagtgtgcaaagaagattggaagctcgtctatcgcttcagccgaacggcgcgaaacgtcatgatcatttattttttattcagtctggtcatgaccgttatgccatccgcgcttgattcgcttgaagccgctttttcaaaagaagttcttcagctgactgatgccgattacggttttctcgtcagtgtctcaggggcaggcattattgcgggggcgcttgtcaatgtattctttaataaaaaaatgccggcttctttattgatgggaatgggctctttattcacagcgtttggatatataatttatgcgttttctgacgttttttggacggctgctttcggatttttccttctcgctttttttctggcgtttgccaatacgggatttcagacgttttatcaaaaaaatgttccggtggacattatggggagagtggggagcttttattcattagtcgaagccgtcttcattatattgataacggcggttttcggagcggcggctgtcagttcttccgtccgcggcatcgtcatcgcaggggctgctgttatgctggcgttggcagccgttttatgctcgttcttattagcggccgcaaaaaggaggactcccgatgtatttcaagcggatcaatgtaaacaaacataaagagacggccgtttcatttcgtgaggatgagtatctcaggtggctgtcatcccaaatctaatgctcacccgacaattttaagctgcttcttcataacgggcagccgatcggacagcttgaagcttccatcaaattttaccgcagccaaaaaatcggttatgtgcacctttactatatgactgagcagcagaggggaagagggagcggaacaaaactgcatcaatacgcgaatcagtttttcagagcgaacggtgtttcggaatatcacctgagactttcgccgggcaatgaagcggctctgtcattttacagaaagaaaaacatggaagtgatcggttcagaatgtaacggaaaagttctcagaatgagaggagccgtaccgccggaatagggggcggtacgcgtttcattttctcgttgtttttaaaagaccgggaaacttcttataaatgaccgccattaagacgagcatatacattccgtaaatcccgaaagacagcagtttgttgcttgtaaatgaagcgcctgcgacggtcacgatcacaatgttcggaattttgccgagcaccgacgcagaaaaaaagatcggccatcgtatgttactcagcccgcagacggtattcatggcaagcgacggtataatcggaatcagccgcccgaaaagcaccgccgtaaacgcgtgctgatgaaatgaatcttcatattgggccgctgccgggtaagccagcagcttttttctggcccagtctctgaatccgtaccggacgagaaaaaacaatgccattgttccgagcatcgcgcctgacaatgtaatccacaccccgtttacaatcccgaaaaccgctccgtttaaggccgcgataatggcgaatggaacaatcggaaaaaatacgtcagctgcgaccagaaggatactcataagcacggcgtacatgccgcccgcgcgaatcatgctgagccagacgtctttttgcataaagccgatcatcacgacagcaatgatgacggcaagactgaatcccttttttatcatctgcacgttcacctcttgtcaattagtatacagcacaaatctatctccttctattaaaataagctgtccgataagcgtatttgatttatcagcatttgccgtttgatgagaaacggctggcacccgggtttggacaaaaacaagcgggaagcgggtgatgtgcatcatttgatgcagagaatgatttttataaaaggggacacgttaacagtagtgtttactggaggtgtaaacgttgagatgctttcatctgatcatcatgatatgcgtcctcacgagtctcactgccgtgtccgccgatgcgaaatctttaaaaagaagtgacatggagaagacgggaaacgtgtactgggatataaggtctgaaaaaaagaaactatctttaaccttcgatgacggcccccatcctgtctatacggaggctgtgttagacgtgctgaaacagcacaatgttaaagcaacctttttttgtgtcgggagccgtatagacaaataccccataacggcaaaacgcatcgttgaagaagggcatgaaatcggcaaccatacgatgaaccatgtttattttcaccgactgaaacgcaaagacattttacaagagcttcacagctccgcgcatcatatcacatcgcttcagccggaaggggacaagttattccgcccgccgggagggtcgctgaatcgtacggctttcaaaagcatcttaaaagagggctatcatatcatcatgtggtcatggaaccaagacccgagagactggaaaaggcccgggaaaggaaaaatcgtcaggcacgttgtttcacatgccagagatggagatatcgttcttctgcatgacggcggaggaaaccggcgccagacggttgaggctttgaaagaaatcattcccaagctgaaaaagcagggctacacgtttgttaaggtttcggatttgatcggacaggattccggtccttttcatatccagtaaagagagcgccgcgttgaaagccgccaaagagatgtgtaccataggaggtaaggtttggggggagagaaaatgaagtttgctgttctttttattacgataatctgtctgttatcaggatgcgctgcgggcaaagaaaaaagtgttgtcgcgttcggcgacagcaatacgcgcggttccaactgggattatcgtgattatccgaaggcgcagcagtgggtaaacattttaaaaacagcggaacgcggccgtcttacggttataaatgcgggaataggcggccagacgactgaggatgcgcgcctgcgctttcaaagcgacgtgctggaccgtaagccccaatatttatttatcatgttcggaacaaatgatgcgggcattttgacgggcgatcagccgcgggtatcaaagaaacggtttaaagaaaacctgacttatttcataaacgaaagcagaaatcacggcataaagccgattttaatgacgtgcatcccggttatagaaggaaacggaacgcatcatctctattactattcgagatataaagcctcagcctttaaagaaaaaggcggcgcgagaaaatggcataattcctataacggcgttacgaggcaggttgcagctgagttgaaagtgccgctggtggataactggaaacactttatacgcgcggacggcggcaaagatacagaccgggcgctgatccaatccggactgatagatccctccggaaatcatatgacgccaaaaggcgccagaatcttaattgaaggcataaaaaatgggcgggttttggaacgctgacgccgtcagctgcctaaaccgttttgcttctgcttcataggctgtagaaaaacatctctttggaggcgattgctatgaaccgcggtttccctccgcaatatcctgtatgcccgcctcctcgggtgaatgcggggtactggtacgcattttttgttgtgctgctcgtcgtcattctcgtcctgggcggtctgtattggttcaatatatagcagccgtcctcttaaacacctctattttaggggtgttttttgttgaaagtggtagtaatgcgcataaccgaagtgatataatatcagtcatctgagtaaaaaaaggaaattcgcccgggaatttttttctgtttaagaagaaacggaaataatgtgtccgagcgatcttcttttgatttcgttttcaattaactcgataaattcacggctcaaattcatttcattggctttgaaataagattctattagtaattcatcagaaagctttctcatgccggggacccaattaatgggagtggcacctccttacaattgtaatcaatcatcagacgcaagcatatgatggaaggttgcgtttcaatcatggtgaggttatctttaatctaccatgaaatacaaataagaacaatcgttctgttatccacactcgtaagtggataacttgttagtatcttgtttataatctggataaatccggatgtaataagagtggataatgtgtgtaattttatccacaactggtgaagaaacccaatttttgtcgaaatttttttactgagtccgactttgtttttaaatctgacaggtttcgacatatagatgatagaaagaaaaggaagggtgcgggttttgttaaaaaagttttttttacctgacgaatttgtgaaaaatatatttcatatcacaccggaaaagctcaaagaacgcaatgtgaaagggattattacagaccttgacaacacgcttgtggagtgggacagaccgagtgcgacacctcgattaatcgagtggtttgaagaaatgaaggagcacggcattaaagtcacgatcgtctccaataataatgaacgaagagtgaaattattctcggagccgcttggcataccgtttatttataaggcaagaaaaccgatggggcgcgcctttaaaagagccgtcagcagcatggatctgaaaaaagaagactgtgtggtcatcggcgatcagctgcttactgatgttctcggcggaaacagaaacgggtatcatacgatcctcgtcgtgcctgtcgcttcctctgacggagtcatgacgcgctttaaccgccggattgaacggagaatattgagttctttgaaacgtaaaggccatattcagtgggaggattagaaatggaaaaggttgtttgcatcggctgcggagtaacgatccagaccgaggataaacaaggtctcggatacgcgccaaaggcatcgctcacgaaagagaatgtcatctgccagcgctgcttcagactgaaaaattacaatgaaattcaagatgtttcattaacggatgatgactttttaaatatcttgcacacaatcggcgatactgactctctaattgtcaaagtcgttgatatttttgattttaacggaagctggataaacgggctgaaccgctttgtcggcggtaatccgatcattcttgtcggtaataaggccgatatcctgccgaaatccgtaaaacgggaacggctcgttcaatggatgaaacgcgaagcgaaagaatacggcttaaaaccccttgatgtctttttaatcagcgcttcccgcggacaagggatgaaagaagtcattgacgccattgaacattaccgcgaagggcgcgatgtgtatgtggtgggctgtaccaatgtcggcaaatccacatttatcaaccggattattaaagaggtctcaggggaagagaatattattaccacctctcaatttccgggcacgacacttgacgcgattgaaatcccgctcgatgacggatctgcgctttatgatacgccgggaatcattaaccatcaccagatggcgcattacgtggacaagcgtgacttaaaggtgctgacaccgaaaaaagaactgaagccgcgcacttttcagctgaatgaaaaacaaacgctttatttcggcgggcttgcccggtttgactatgtatcaggcgataaaacggcgtttgtctgctatatgccgaatgaattgatgattcacagaacaaagcttgaaaatgctgatgccttatacgaaaagcatgcgggagaactgcttaccccgcccggaaaagatcatttggatgaatttccggagcttacaccccatacgttttcgattaaagaaggaaagacggatatcgttttttccggtctcggctgggtcacggtgcagcaagcagataaaaaaataacggcatacgctccgaaaggcgtacacgtatttgtccgccgttcattaatatagagagaaggggagagggagcatgaaacaattgtacggagtaatcggaaatccgatcggacattcaatgtcacccgatattcataacgcggctttgcaagataagaacatcaacgggcagtattttgcgtttcaggtggaacctcatcatctcaaggacgccgttaacggaatcaaggcgcttggcatctgcggagtgaacgtcacagtcccgcataaagtcgcgatcatggagcatctggatgaaatacatgaaagcgcgaaagtactcggggccgtaaataccgtcaaaagagagggagacaggctcatcgggtataatactgacggagatgggttttataaatccttagtcaaagtattggacaaaccgatatcagagctctccatcctcatgattggggcgggaggagcggcaagagcgatttttacgacgatcgtccgcggagagccgaaacaatttgacgtttgcaaccgcacgccggaaaaagcagaaaatctgattgcggctgctccctcttttcagcagaaacgcgcccttactttaaaagaagctgaaaatcagcttgaacaatatgacgtcattattcatacaacatctgtcggcatgtatccgaaaacggatgccgtgccgctctcattggaacgggccaaaacgggcgccatcgtttgtgatatcgtatacaacccgattcaaacggcgttcttaaaagaagctgaaaaaagaggtttaacaacccttgacggtgtcggcatgtttgtggaacaggccgcactgtctttcaagctgtggacgggacaagagcctgacagcggcttaatgagagcaattgttgaaggaaaactaggaggaacacaatgttaacaggaaaacaaaaacggtttttgcgttcaaaagcgcatcatttaacgcctatttttcaagtgggaaaaggcggagtcaacgaaaacatggtgaaacagattgccgaggctttagaagcaagagagctgattaaagtcagcgtgcttcaaaactgcgaagacgataaaaatgatgtcgcagaagcccttgtgaaaggcagccgctcacaattggtgcagacgatcggaaatacgatcgtattgtataaggaatcaaaggaaaataaacaaatcgagcttccgtaaggtggttgacatgaagaaaatcggaatattcgggggcacatttgaccctccgcacaacggacatcttctgatggctaatgaagtccttcatcaggcggagctcgatgagatttggtttatgcccaataaaatccctccgcataagcagaatgaagactttacagacagccggcaccgggtggagatgctgaagcttgccatcagctctaattccggctttaagcttgagcttgcggaaatggaccggaaaggcccttcttatacctatgataccgtccgtttactgaaggagcggcacccgaacgacaagcttttctttattatcggggcggatatgattgaatatctgccgaaatggtacaaactggacgaacttctcacgctcattcaatttatcggagtgcggcgcccggggtatcatattgagaccccgtacccgctgctttttgccgacgttccggaatttgacgtttcgtcaacgatgctgagagaacgtctcaaagcaaaaaagccgacgcaatacttaatgccggataaagtgaggcagtatatagaggagaatgatttatatgaatcgtgaggaagcacttgcctgcgtcaaagagcagctgaccgagcatcgctacatccacacaatcggcgtgacagatacggcggttattctcgcaggccggttcggagcagacccgaaaaaagcggaaatggcggctatttttcatgattatgcgaaattccggccgaaagaagaaatgaagcagatcatcgtgcgggaaaaaatgccggctgagctcttggattacaatgccgagctgtggcatgcccctgtgggagcgtatttggctgagaaagaagcggggatcactgatcctgagatcttggatgcaatccgctatcacacgtcagggcgtcccggaatgacccttttagacaaagtcatttacgttgcggattacattgaacccggacgccatttccccggagtggaagaggtgcgccgtctggcggaaacagatctgaacgaagcgctcatacaagcaatgaaaaatacaatgatatttctgatgaaaaaaaaccagccggtctttccggagacgtttgcaacctataattggctggtgtctcaaaattgacaggaggaatttaaagaatgaatcaagcttccgtattaaaaatcgcggcaaaagcatgcgacgataaacgtgcagaagatattttagcgctggacatggaaggaatctcacttatagcggattactttttaatctgccacgggaattctgataagcaggttcaggcaattgcgcgtgaaattaaagatcaggcagaagaaaacggcattgatgtcaaaaagatggaagggtttgatgaggcccgctggattttagttgatctcggcgacgtcattgtccacgttttccataaagatgaaagaagctactacaatcttgaaaagctatggggcgacgcaccgctcgcagagcttgaactcggcttgaactcatgatttaccaaggcttcgccggcgtatatgacgagttaatgtcacatgcgccgtatgatgaatgggcgggctggatcgaagcgtctcttccggaaaagggaagggtgcttgatcttgcctgcggaaccggagaaatatccatcaggcttgctgaaaaaggctgcgaagtcacggggattgatttgagtgaagatatgctgagctgtgcccagcagaaaaaaacgggaaagccgattctttttctccaacaggatatgagagagctttccggttttgaagaacagtttgatgccgttgtcatctgctgtgattccctaaattacttaaaaacgaaaaatgatgtcttaagcaccttcaaaagtgtttttcaagttttgaaggagggcggcctgcttctgtttgacgtccattccccatttaaaatgacggagctttttccggacagcacccatgcggatcaggatgagcagatcagctatatctggcaaagctttgccggcgatgaagagctttctgtcatccatgatatgtccttttttgtatggaacggacaatcttatgaccgttatgacgagacgcatgagcaaaaaacattttacattgaagaatatgaacaaatgcttgcagagaccggatttgaactgaagaaagtgacggccgattttacagaccggcctccttcaacagagtctgaacgtcttttctttacggcaggcaaaccaaaaaccatcgtttaaacggaacgatggtttttaaaatgcattttttgcgattggcgcgataaagcactttatggcatactcagttacacgtgaaattgcttcttcactaacgatatatcttcatcgtatttgttatgtgtacgctgaaagacacggttgaacatatcctgaacaccgctttcgagagccttcagtccttctccggtgacgccgccttttacgcatactttttcctgcaaggcgggaagtgtgtaatgccctgtttccagaagctttccgagaccgacaagcatttccgtcgacataatcacggcttcttctttggtgatgtccgtttcttccactgccgcgtcaataaagcgctgaacgagataactcataaaagcgggcccgcagctgacaatgtctgacgccgctcttgtaatgccgctgctgatttctacaggttttgaaatacgagtgaacagcgtttgaatatccgcttttgcagactcgctgcagcttttgccgaacgtaacaagcgagacgccggccaaggcgcggttcgtaatgctcggaatgacgcgggccgtctgacacggaaccgtatgttcaatctgatccgtctgaacggggctggtaatggagattaaaatgtggtctttccgtaaatgcggtgtgagttttttcagcaaaggatatatatccagcggttttacacaaatgaatattatttcattatcctgtacgagcttttcctgatcctcggtgacatggatgccgctgaaacgttcttttagttttaatgctttttcgattgttctgtttgtgatggtgatatgtgagggatcggcagcgtttgattcgataaacgattcaatcaggatcgttcccatgtttccggtgccgataaagcctattttcaatgaattcccctcctttttcccttaatcctctaaaccttatgcggggaggcaatgcaatatgacgaaagcgatgatgacggagcggctgcggcggaacctgaaaattctgggcgcttgtcttgcggcaggggcggtttttatctgcatttggctgtttcgttctgaaaaggaagagccggtcaaacagcagtccgtgctcggccaaacagcctcagcatccgttgcggacaaaaaagacaccgcagccgataagattatgattgatgtgaaaggtgcggtccgaaatcccggcgtgtatgaaatgaaagcgggagacagagtgacgcaagccattgaaaaagccggcggcctgaagaaaaaggcggatgaattgaatgttaatttagcagagcagctgcaggacgggacgatggtttatattccgagtgaaggcgaagaggagaatcgcccgaaaacagcggcgggtgaaaaggagaatgcagctgtcaatatcaatacggcatctctggacgaacttcaggcgatttccggggtggggcagaaaaaagcggaagcgattatcgcctaccgagaagaaaacggacggtttcagactgctgaagatttgatgaatgtatcaggctttggagaaaagtcatttgagcggataaaaacttccattacggtaaagtgaattgacggttctgcttaaatctatgtaaacttagaaaagcaacaagactttttggagggaacacttgtggaacgaatctcatggaatcaatattttatggcgcaaagccatttgctggcgctgagaagcacatgtccgagactgtcagtcggggcaaccgtagtcagagacaagcggatgattgccggcggatacaacggctcaatcgccggcggcgtccattgcgctgatgaaggatgccttttaatagataatcattgccagaggaccatacatgcagagatgaatgcgattctgcaatgttctaagttcggtgttccgacggagggcgccgaaatttatgtgacgcattatccttgtattcaatgctgcaaatcaattatccaggcaggcatcaaaacggtctattatgccgaagattacaaaacacagccttatgcaaaagagctgttcagccaagccggagtcaaggtggagcaggtcgaacttgatgaaatgatcatcgatctgaaaaaccgcgaaaaattgtcttttgtagcaggtctgattcagcaattatctgatgcgggagttaaggcagatgaactgaaaaaaattcatgaacaggccaatgagctgtttaccagttacgtataaatgaaatataaataccttcttctgcctctggcggcggtttctgcaactgcgggaattgccgctgctcatgtcttctgggttctgctcctttttcttctgtatcttctctttattattgtaaaaacaaagcaccatgctccggttatcgtctgcctcgtttctttttgtgtttatttctttctttatacggtttgtgacgctgcgaatgtaacgcgctatcaggccggcagttatactgaacaggccgtcattactaatattccgaaggttgacggagcgaaaatgtcagccgttatccgtacacatgacaaggaaaagtgggcggcttcgtacaaaatccgttctcttgaggaaaaaagactcattgaacagcttgaaccggggatgcgctgcacgtttacaggctctctggaacagcctgcacatgcgacggttcccggaggttttgattataaggaatatctttactctcagcagattcactggttattttccgtgacttccattgagcagtgtgaaaaatccaaacagccgctgtttaaactgctgaacatcagaaaaaatttgatttcgatcattcggaatcacgtgcctgaatcttccgccggaattgttgaagcgctgaccttaggtgaaagattttctatagaggacgatatactgagtgcatatcaaaatttgggagtcgttcatttaatggcgatttccggaatgcatgtcggtcttattacggcgggattattttatgctctgatcagaatcgggctgacaagagaaaaggcgggaattttgctgctgctgtttttgccggtgtatacgctgctgagcggtgccgccccatccgtattgcgcgcatccctcatgctgggattttatatcgccggaactcttgttaaacgcggcattcattcctctgctgcattgtccttgtcttatctgctgcttctgctgtttaatccttacttcctttggcaggcgggcttccagctttcctttgcggtaagcgcctctttaattctgtcatcctccattttaaagaaagcaggggaaagcagacttgccgggcttgcgatggcttcattcattgcggagctcagctcacttccgtttcttctctatcattttcagcagatttcacttgtcagttttccgatgaatatggtgatggtgcctttttatacgttatttgtcattccggtttctgtcatcggtttccttcttcttttactctcaaggcagatgggagaatgtttgtttggtatgtttgaccttgtgatgaagcctgtgcatgatttcattacatatgcggcatccgttgatttatttactatgattgtgtcaaagcctgactttgtttcccttcttctgcttgcggtttccgtttttacgctttttgcggctttggaaaagggaggttttttaaaactcaggaaatcggctctttttttctgcgcggttttggcttatttaatatgccgtccgtatttcagtccatggggagaagcggatatgcttgatatcgggcagggagactcactgtttataagcgcgccgcaccgcaaagggaccgtaatggttgatacagggggagtgattgcttatcccggagaatcatggaaagaaaaacgccacccatattctatcggcgagaaggttttgattccctttttaaacggaaaaggggtgaaaaagctggatgcgctgattttaacccatgcggatcaagatcacatcggggaagccggagtgttaatcaaaaatcatagagtcaaacggttaattgtccccgtaggattcgtaaaagaaccgaaagatcagaacatattaaatatggcgaaagaaaacaacattcccgttgccgaagcaaagcggggcgacaccattacagccggggatcttcagtttcaggtgctgtctccggagtcgtctgacggaaggagtaaaaatgattcgtcactggtgctttggacggtttttggcggagtgagctggcttttgacgggagatttagaatcggacggcgaaacggaagtgctgaaaacgtatccgaaactgaaggctgatatattgaaggcgggtcatcacggcagcaaaagctcaacgagtgaagcctttttgaaacagcttcagccggaagcagcgctgatttcagcaggaaaagagaatcgataccatcatccgcatgaagaagtgctggatcgtttgaaggcgtactctgtcaatgtgcttcgcaccgatatcagcggaacgattcaatacagatttgaaaaaggcgccggaacgttttccgtcttccctccatatgatatagaagaaaccagggcgcaagaagtaaaaaagactgccgattgacagcagcccggaatgcggctaagagccgataagatggatggctgttgccatcacgaacaaaaaggcgaaaaatccgaaggacacgacaaaaccgacagctgagtcaacagcatcatttcgtttgctttgaacgtttttttcaaaatcattcaatttcatccctcctgacttccctaagtatactggaattgttttgaaaaatctagaagtgatggtaacgttttctgttcttgtgattatcgcctttttacaagcagacccgggagcttgtgaatcaggcgtttattataaatgaggaagctgtcctttttaaagcttcctctttactatttgccgaactcaatttaggatagaaggggatcaagaaagagaggaagtcatacgatcatggtatttgatgtttggaaagccctgaaaaaaggggatgtccgctccgtttattgcttatacggaaaagaaacgtatctgctccaagagactgtcagccggatcagacaagctgtcgttgatgaggagactaaagattttaacctgtctgtttttgatcttgaagaggatccgcttgaccaggccataaccgatgcggaaacgtttccgtttatgggagagaagcggctggttatcgtaaaaaatccgtcttttttaacaggggaaaaaaagaaagaaaaaatagagcataatacaagcgctttggagacttacctgaaggagcctgcgccttatacggtctttgtgattgtggctccgtatgaaaagctggacgaacggaaaaagctgacgaaagcgctgaagcaaaaagcccttatgattgaagctaaggagctgaatgcaaaggagacgactgattttacgattaatctggcgaaatccgaaaataaaacgatggatacagaagctgctgagcatttggttctgcttgcaaacggccatctgtcttccatatatcaggaaatacaaaaactctccgcctacaccggtgacagacatgagatcacgcttgaagatgtccgggagcttgtcgcaagaagtttggagcagaatatttttgagctgatcaacaaaatcgtgaaccgaaaacggacggaaagtcttcaaatattttatgatcttttaaaacaaaacgaagaaccgatcaaaattatggcgctgatcgccaaccaattccgtctgattatgcagacaaagtattttgcgggacaaggatacggccaaaagcaaatcgcttccaatttaaaggtgcaccccttccgggtaaagctggcggtggatcaggcgaggcttttttctgaagaagagctgcggcgtattatagaaaggctcgcagtgatggattatgaaatgaaaacggggaaaaaggacaagcagctcttgctggagctctttctccttgagcttctccggactgaatgaaaaaaacgatccccgttaaagggatcgtttttgtattatgcagaaagtccgttcacttgtttcgcaagtctagatttgtatcgagctgcggcatttttgtgtacaagacctgttttcactgctttatcaatgcgtttcgctgcttcagaaagagcagttttcgctttatccgcttcgttgttagcaacagaagcttcaacttgtttgattgcagtacgcatagcagatttgattgtcgcgttatgagcgcggcgttcgttgtttgtttttgtacgtttaatcgctgatttaatgtttggcatgtgtttcacctcctaagatacaacctgtagcacagtgtcttaaggttaaatcttcttcacaatagaacaaattgtattctatcaaacagaactttagattgcaatataaatgtaaagtatttttcgttgatgggtaaattcgcatgattcgttttgtaaatggtcacactatgtaccacgatgattgaaggaggtctttcctgtgaaaaacaacgaactggatgtcaatcaatttctgatacggacggatttagcggtagaaacgaaacaggcggtaaaagacggacaatccggtcagacaaaagaaataaacgggtttattgaaaaagaacgcgacaagggcggcattaaagtcagaaccgtcgatattaccaaagaaggcgccgagctatcggggaaaaagcagggacgctatgtcacgatcgaggctcaaggggttcgggaacacgactctgacatgcaggaaaaagtaacggaagtgtttgccgaggaattttccgcctatctgtcggcattaaagattccaaaggatgcaagctgtttgatcgtcggtctcggcaactggaatgtgacgccggatgcgctcggccctctcgtgaccgaaaaccttcttgtgacacggcatctgttcaggcttcagccggaaaacgtacaggaagggtacaggccggtcagcgcgcttgctcccggtgtgatgggattaacgggaattgaaacgagcgatattattcaaggtgtgatcaaagaatcaaagccggattttgtgattgcggtagacgctcttgcggcaagagccgttgaaagggtgaacacgaccatccaattttctgatacgggcattcacccgggatcaggcgtcggcaataagagaaaagaattaagcaaggagacgctcggcatccccgtcatcgcaatcggggtaccgactgtcgttgatgcggttacgatcgcgagcgatacggtggattatatattaaagcatttcggcagagagatgaaagatgacagcccgtcaagatctctggtgcccgccggaatgaacttcggcaaaaagaaggtgctgacagacgaagaccttcccggagaaaaagagcgccaatcctttctcggtattgtcggcacgctggacgaaaacgaaaaacgccagctgattcacgaagtgctttctccgctcggccataatctgatggtcacgccgaaggagattgacacctttattgatgatatggcgaacgtgcttgcaaacgggttaaacaccgcccttcatgaaaaagtgtcacaagataacaaaggctcttataatcattaaaatggttctacctcctctagcttgttcatagagtaattactagacaagcgctggagggattcaaatcatgagaaaaaaacgcagaaaccgtcaaattgtcgttgcagtaaacgggggaaatgcgctcaagggcatgtttttgtttatgacaagccttatcgttattttcgtattatcgggtgtgctcacatcgcttcgccctgaactgaggctttcttcggattctcttcacggaattgccggagaacttccgggtgacgcgtttgcacacctcctcggcatggaaaatcattatttcgcctcagagcttcctgaaaaagactcttttcagctgtcccggctgtccttaaaactggcgacaagcattaatatggaagacccgcggagtttcttgggacgtgagctgccgggatttgcccaatatgatacggagatccttctggcggggcaggggacggattatacgaatatgccggctgaatctccgccgccgtcaaaggtgatggaaaaagaaaaagaagtgaacatggcagaaatcgaaaacaaaacgaaaaaagaagaaacggcgccgccgaaacattcaacaggcagcaaaaaagtcgtttttatttaccacactcataataccgaatcctatcttcctctgttaaagggggaaacaaatccggataacgcccgccattcgaaggccaatgtcacgcttgtcggagatatgttcggaaaagcgcttgaagcgcaaggtgtaggagcgaccgtagataaaaccgacattcaggcccgcctgaacaaagacggtttaaattatgcgcgaagctacgacgaatcaaggccggtcgtaaaaagcgcgctcgccaaaaataaaaacctgcaatataccatagacattcaccgggattcccgccgcaagaaaaatacgacagccgacatcaaaggaaaaagctatgccagagtcgccatcgtcgtcggcaaaaaaagcgctaattttgaagaaaactataaactcgcaagtgaacttcataagctgatggagaaaaaataccccggcttaagcgtcggtgttttatcaaaaggctctccgggagataatggagtatacaaccaagatttaaacgaccggtcgcttctgctggaattcgggggcgtggataacaatcttgaagaactgaggcgcgcatcagatgccgtggccgatgtgttcagcgaactgtactgggatgcagaaaaagtcagctcgcaatcaggagagaagaaaaaacaatagaaatcaggtgattcgaatgatccgttttaccggcaaatgcctgctgatcgccattgtcatgtttttcggcgtattgttcggcatgcagcaggcaaacagcggaatgcttgatatgaaaggatacaaagacccttccttaaaaggagcattcacgctcggcggcggagaaggacaggaaaaagaagcttccattttggggcaaaccgttacggcgaaagatctggaagaaaaacaaaaacagctggaacaggcggaaaccttcaacctgttttcaaaagccggagaaaccctttcaaataccgtgacggactcggcgcaggcgatgtatgagtgggtttcgaaactgaaccgttagcattgatgaagagaaaagcggatgattccttaaaggaagcttttctctttcttgttttaattgaatgtttacaatcctattgatataatctaagctagtgtattttgcgtttaatagtaggagtgatagattgtgacagataaagaaaagcgtttagagaggcagtcaagaatccggaatttctccatcatcgcccacatagaccacggcaaatcgaccttggcggatcggattttagaaaaaacatcggcgatcacccagcgggaaatgaaagaacaattgcttgattcaatggaccttgaacgcgaacggggaattaccatcaaattaaattccgttcagctgaaatacaaagcaaaagacggagaagaatatatatttcatctcatcgacacgcccggacacgtcgactttacatatgaagtatcgcgaagcctggctgcctgtgaaggcgcgattctcgttgttgatgcggctcagggaatagaagcgcagacattggcgaacgtctatctggcgcttgataatgatcttgagattcttcctgtcattaataaaatcgatctcccgagcgcagagccagaacgtgtgcgtcaagaggttgaggacgttatcggccttgacgcttcagacgccgtcctcgcttcagcgaaagcgggcatcggcatcgaagacattttagaacagatcgtagaaaaagtgccggctcccgcgggagatccggaagctccgctgaaagcgctcatctttgactcgctttatgacgcgtaccgcggagtcgtcgcgtatatcagagtcgtagaaggaacggtcaaaccgggccagaaaattaaaatgatggcaaccggaaaagagtttgaagtgacagaagtcggtgtgttcacgccgaaagcaactccgacagatgaactgactgtcggcgatgtaggctttttaactgctgcgatcaaaaatgtcggtgacacacgcgtcggtgacacgataacaagcgcggccaatcaggctgccgaagcattgcctgggtatcgcaagctgaacccgatggtgtattgcggtttgtatccgatcgatacggccaaatacaatgatttaagggaagctcttgagaagcttgaactgaatgactcatcgcttcaatatgaagcagagacatcccaagcgctcggattcggtttccgctgcggatttttaggtatgcttcacatggaaatcattcaggagcggattgagcgtgagtttaaaatcgacctgatcacaacggcaccgagtgttatctatgatgtgtatatgacagacggcgaaaaggttgttgttgacaatccgtccaacatgcctgacccacaaaagatcgaaagaatcgaggagccgtatgtaaaagcgacaatgatggtgccgaacgattatgtcggtgcggtgatggagctttgccaaggaaaacgcggcaattttatcgacatgcaatatttagacgcaaatcgtgtcagcattgtctatgacatgccattagcggaaatcgtatatgaattttttgatcagctgaaatcaagcacaaaaggctacgcgtcctttgattacgagctgatcggctacaaaccgtctaaacttgtcaagatggacattatgctgaacggagaaaaaatcgacgccctttcatttatcgtgcatcgcgattacgcgtacgaacgcggaaaggtaattgtagaaaaactgaaagagctcattccgcgccagcactttgaagtaccgattcaagcggcgatcggccagaaaatcgtggcccgctctaccattaaagcgatgcgtaaaaacgtattggctaaatgttacggaggagacatctcacggaaacggaagcttcttgaaaaacaaaaagaaggaaaacgccggatgaagcaggtcggctcagtagaagtgccgcaggaagcgtttatggccgttcttaaaatggatgacagcccgaaaaaataacggaagccgccgcagccccgcgctgcggcttctttctgtaaagaagaaggtgtttcaaaatgaaatcagcttatattcatattccgttttgtgagcatatctgccactattgcgatttcaataaatattttattcagagccagcctgtcgatgagtacttaaactcactcgaaaaggaaatgataaatacaatagaacggacgggacgccctgatctccgcacgatttttatcgggggaggcacgccgacatcgctctcacccgtccaactggaaaaattgatggattccattcaccgcgtgctgaagccttctgacggactcatagaatttgccgcggaagcgaatccggatgatttatccccggaaaaattaaaaatcatgaaaaatgccggtatcaaccggctgagcttcggtgttcaaacctttgaagatgagcttttacaaaaaatcggcagagtgcataaacaaaaggacgtattcacttcctttgaacgtgcgagagctctcggcttcgacaacatcagtctcgatttaatgttcggcctgccgggtcagacgctggccgatcttgacaattccgtcaaaacggctttgtctcttgatgcggagcactattccgtttactcgctgatcgtagagccgaaaacggtgttttataatttaatgcaaaaaggccgcctgcatctccccgcgcaagaacaagaggccgagatgtatgaaacggtcatgaggcagatgagtgaagcgggcatccgtcaatacgagatcagtaactttgcaaagcccggatacgagtcccagcataatctgacgtattggagcaatgaagagtatttcggttttggcgcaggcgctcacggatatatcagcggcacgcgcaccgtcaacgccgggcctgtgaaacattacatgcagctcatcgaagaaaaggggctgccttaccgtgacacgcacgaggtgacacgtgaggagcagattgaagaagaaatgttcctcggtctcagaaaaatgtccggcgtacaaaagcaagcttttctcgataaattcggacgctcggtcgacgaactgtttcccgatgttctcaaagatttaaccgaaaaaggcctgatctgtgacacggaagaatcggttgcattaacgcatgaaggcaaattattaggaaatgaggtttttggcgcttttttgggtgagttataattgacatttttcttttggtttgttacttttgatatagaattagcactcgctgaccttgagtgctaacaggggtgatgatgatgttaacaaatcgtcagctgttgatcctgcaagtgattattaatgattttatacaatcggcgcagcctgtaggatcaagaactctttcaaaaaaagacgagattacattcagctctgcaacgatcagaaatgagatggctgacttggaggaattgggctttattgaaaaaacccattcatcctcaggacggattccgtcggaaaaagggtacaggtattatgtcgatcatttgctgtcacccgtcaagctgacaaaaaccgatctggatttaattcactcgatatttaaagaaaaaatcttcgagctggaaaaaacagtccaaaaatcagcgcaaatcctgtccgatctgacaaactacacatcgattgtcctcgggccgacgctgagcgagaactatcttaaacagattcaaatcgttccgatccagccggataaggcggtcgccatcctcgtcacgaacacggggcatgtcgaaaaccgcaccatcaatttcccggctaaagtggatttggccgatattgaaaaactggtcaatatactaaacgatcgattagcgggcgtgccgatggacgaactgaatgagcgcattttcaaagaggttgtcacatatttaaggcagcatatcgccaactatgacagcatacttgaatcgctccgctccacattccatccggcggcccacgttgagaaattgtttttcggcggaaagatcaacatgctgaatcagccggagttccatgatattgaaagggtccgctcgctcttatctttaattgaaaaagagcaggatgttctgaagctgtttcagtcatcaaaagccgggatttcaatcaaaatcgggaaagaaaacgactacgaagaaatggaaaactgcagcttaatcacggccacctatacagttgatacgaagcagatcggatcaatcgcgattatcgggccgacgcgcatgaattattcaagagtcgtcagcctgctgcagcatgtgacttcggacttgtcaaaagcattcacaagtttgtatgatgaataagggaattttggcaatcattttcagtcatctttttacagcatttgagggaggtgaacacaatgtcagaagaaaaacaaaccgcagaacaggttgaagcagcagaacaagaagaagtgacagaacaggcagaacaagccgcttcacaagagcagcatgaagaaacggcaggtcaggaagaagcccttcagcaccaaattgatgaattgcagggtttgcttgatgaaaaagaaaacaagcttttgcgtgttcaagcagactttgaaaactataaacgacgcagccgccttgaaatggaagctgctcagaaataccgttctcaaaacgtcgtaacggaaatccttccggcgctcgacaactttgaacgggcgttacaggtagaagctgaaagcgagcagacaaaaagcttgctgcaaggtatggaaatggtccgccgccagctgatggacgcacttgaaaaagaaggcgttgaagccatcgaagctgtcggtcaggaatttgatccgaaccttcaccaagccgtcatgcaggtggaagatgaaaacttcggcagcaatattgttatcgaagaattgcaaaaaggctacaaactgaaggatcgcgtcatccgtccttcaatggtaaaagtgaatcaataactacatagcaggaggtaattcaaagtgagtaaagtaatcggaattgacttgggtacgacaaactcatgtgtggcagtgcttgaaggcggagagcctacagttatcgccaacgctgaaggaaaccgtacgactccgtcagtcgttgcatttaaaaacggcgagcgccaagtaggggaagtggcgaaacgccaatccatcacaaaccctaacacaatcatgtctgtcaaacgccatatgggtactgactataaagtggaaatcgaaggaaaagactacacgcctcaagaggtgtcagctattatccttcagcatctgaaagcatatgctgaaagctacctcggcgaaacagtttcaaaagccgttatcacggttcctgcatacttcaacgatgcggagcgccaagcgacaaaagatgccggtaaaatcgccggtcttgaagtagaacgtattatcaacgagccgactgcagcagcgcttgcatacggacttgataaaacggacgaagaccaaacgattcttgtttacgaccttggcggcggtacgtttgacgtatctgttcttgaacttggcgacggcgtgtttgaagtccgttcaactgccggtgacaaccgtcttggcggggacgactttgaccaagtcatcatcgatcatctcgtagcagaattcaaaaaagaaaacggcattgatctttcaaaagacaaaatggcgcttcagcgtttgaaagatgcggctgagaaagcgaaaaaagatctttccggcgtttcatctacacaaatttctttaccatttatcacagcgggagaagcaggtcctcttcaccttgagctgacactgacccgcgctaaattcgaagagctttccgctcaccttgttgagcgcacaatggctcctgtccgtcaggctcttcaagatgcggatctttctgcgagcgaaatcgacaaagttatccttgtcggcggatcaacacgtattccagccgtacaggaagcaatcaaaaaagaaacgggtaaagaagcgcataaaggcgtaaaccctgatgaagttgtagcgctgggtgcagcgattcaaggcggcgtcatcacgggagacgtaaaagacgttgttcttcttgacgttacaccgctttctcttggtattgaaacaatgggcggcgtgttcacaaaactgatcgaccgcaacacgacaattccgacgagcaagtctcaagtattctcaactgcagctgacaaccaaacggctgttgacattcacgtgcttcaaggtgagcgcccgatgtctgccgacaacaaaacgctcggccgcttccagcttactgatatcccgcctgcaccgcgcggcgtaccgcaaatcgaagtttctttcgatattgacaaaaacggtatcgtaaacgtaagagcgaaagatttaggcacaggaaaagaacaaaacattactatcaaatcttcttcaggtctttctgatgatgagatcgaacgcatggtaaaagaagcggaagaaaacgctgacgctgatgcgaagagaaaagaagaaatcgaagtccgcaacgaagctgaccagcttgtgttccaaacggaaaaaacattaaaagatctggaaggcaaagtggacgaagagcaagtgaaaaaagcaaacgacgcgaaagacgcgctgaaagccgctatcgagaaaaacgaaattgaagacatcaaagcgaaaaaagatgagcttcaaacaatcgttcaagagctttctatgaagctttacgaagaagcggcgaaagcgcagcaggctgaaggcggagcaaacgctgaaggcaaaaaagcggacgacaacgttgtcgatgcggaatacgaagaagtaaaagacgacgaaacgaaaaaataagttctttcccgcatggctataggcggaaaaacacacagcatattctgattcaacagacagaaagtcaaagtcaggcatctcttggctttgactttttttcttgcccgggataaaaggaattgaaaaaacataattcaaaatgatacaatctaatttatgtgagaaattcgggagagtgaagcgagatgagtaagcgtgattactatgaagtgcttggggtaagtaagagcgcttcaaaggatgaaatcaaaaaagcctatcggaagctttcaaaaaaatatcatcctgatatcaataaagaatccggagcagatgaaaaattcaaagaggtaaaagaagcgtacgaagcgctctcagacgaccaaaaacgcgctcaatatgaccaattcggccatacagaccctaaccagggattcggcggcggtttcggaggcggcggagacttcggcggcttcggtttcgatgacatcttctcaagcatcttcggaggcggcacgagacgccgtgacccgaatgcgccgcggcaaggcgcggatctgcagtatacaatgaccctgtcatttgaagacgcggcattcgggaaagaaacgatcattgaaattccgcgcgaagagaattgcgaaacatgtaaaggatctggcgcgaagccgggaacaaagccggatacgtgctcgcactgcggaggttcaggccagctgaacgtcgaacagaacacgccgtttggcaaagtggttaaccgaagagtctgtcaccactgtgaaggaacaggaaaaatcatcaaaaacaagtgttctgactgcggcggcacgggcaaagtgaaaaaacggaaaaaaatcaatgtcacgattcctgccggtgtggatgacggacagcagctgcgcgttccgggccaaggtgaaccgggcgtaaacggagggcctgcgggagatctgtttgtcgtattccatgtgcgcgcccacgagttctttgagcgcgacggagacgatatttattgcgaaatgccgttaacgtttgcgcaagcggcactcggagacgaagtggaagtgccgacgcttcacggaaaagtgaaattgaaaatacctgccggcacacaaacaggcacgaaattcagattaagaggcaaaggcgttcagaacgtccggggctacggacaaggcgaccagcacattgtcgtccgcgtcgtcacaccgacgaatctgacagacaaacaaaaagacatcatccgcgagttcgctgaagtcagcggaaacctgccggatgaacaagaaatgagtttctttgacaaagtaaaacgcgcatttaaaggcgagtaatgattggataggagttggtagttttgaaatggtccgaaatcagcattcacacaacacatgaagcggtcgaacccatctcaaatattttgcatgaagctggtgcgagcggggttgtcatcgaagatccgcttgatttaatgaaagagcgtgagaatgtttacggggaaatctaccagctcgaccccaatgattaccccgatgagggtgtcattgtcaaagcgtatctgccgatcaacagtttcctcggcgaaacggtggacggcattaaagagacgattaataatctgcttttgtacgacattgatttgggcagaaacacaatcaccatttctgaagttaatgaagaagaatgggcgacagcttggaaaaagtattatcatcctgtgaaaatttctgaaaagttcacgatcgttcccacttgggaaacgtacacacctgttcatacagatgaactgattatcgaaatggatccgggtatggcattcggtacgggaacgcatccgacaaccgttctgtgcattcaggcgcttgagcgtatcgttcaaaaaggcgaccgtgtcattgatgtcggcaccggttcaggaattttaagcatcgcggccgccatgcttgaggccgaatcggttcatgcgtatgaccttgatccggtcgctgttgaaagcgcgcgtctgaatgtgaaattgaacaaagtgagtgatgcggccgaagtgaagcagaacaatttgttagacggcatcacgggcgaacatgatgtcattgtcgcaaatattttggcggaagtgattctccgctttacatcacaggcgtacgacctgctcaaagacggaggccattttattacttcaggcattatcggccagaaaaaacaggaagtaaaagaagcgttggaaaaagccggctttaccatcatagaaattctgtctatggaagattgggtcagcatcatcgcgaaaaaataacagttagtaggtgtcacagcgtatgcaacgatattttatcgagctcacgaagcaggagatggacgaaactcccgattttcaaatcacgggggaagacgtccaccatatagcgaacgtcatgagaatgagtgcgggcggccggattatctgctgttcgaaagacggccatgaagcgttatgcctgcttaaagaggtttctaaagatcatatatcatgcagcattgctgagtggacgggtgaaaaccgtgaactgccgttaaaaatcaggatcgcaagcggcctcccgaaaggcgataagcttgaatggattatccaaaaagggaccgagctgggggcaagtatgttcatcccctttcagggcgccagatccgtcgttaagctagatgacaaaaaggcaaagaaaaagcgggagagatgggcgaaaatcgcgaaggaagcggcggagcaatcgtaccgcaatgaaattcccgaagtgaaaaccgttcatacgttccggcagctgcttgaaatggcggagaatgtcgataaatgtgtcgttgcatacgaggagtcatcaaagcagggagaaacgggcgctttcgctgcggagctcaaaagccttccgcaaggttcgtctcttttaatcgtattcggccctgaaggcggtctgactgagtctgaagttcatcagctttcagaaaaaggcgccgtcttatgcggcctcggaccgagaattttacggactgaaactgcgcctctttacgcgttaagcgcagtttcctatcatacagagttattaagaggtgatcagtaatggcaactgttgcttttcatacccttggctgcaaggtcaaccattatgaaacagaagcaatctggcagctgtttaaagatgcgggttatgaacgaaaagaattcgaacagacagcagatgtatatgtcattaatacatgtacggtaacaaacacgggagataaaaaaagccgtcaagtcatcagacgggcgatccgccaaaatcctgacggcgtcatctgcgtaacagggtgctatgcgcaaacctctccggcggaaattatggccatcccgggtgttgacatcgtcgtcggcacgcaggatcgtgaaaaaatgctcggttacattgagcagtacagggaagagcgccagccgatcaacggcgtcggcaatattatgaaagcacgcgtgtttgaagagctggatgttcccgcttttactgaccgtacaagagcgtcgttaaaaatccaagagggctgcaacaacttctgtacgttctgcattatcccttgggcgcgtggcctgcttcgttcccgcgatccggaagaagtcattaaacaggcgcagcagctggtggatgccggctataaagaaatcgtcctgacggggattcatacgggcggctacggcgaagatatgaaagattataatttcgccaagcttctccgcgagcttgatacacgtgtagaaggactgaagcggatcagaatttcatctattgaagcaagccaaatcactgatgaagtgattgaagtgctggatgcgtctgataaaatcgtccgtcaccttcatatcccgattcagtcaggatcaaacaccgttctgaaacggatgagacgcaaatatacgatggaatttttcgcggaccgtttaaataagctgaaagaagcgctgccgggtcttgccgtcacatctgatgtcatcgtcggtttcccgggagaaacggaagaagaatttatggaaacataccggttcattaaagaacataagttttcagagcttcacgtattcccttacagcaaacgcaccggaacacctgcggccagaatggaagaccaggttgacgagaacgtgaaaaacgaacgggtgcataagctgattgcgctgtctgaccagcttgcaaaagaatacgcctccgattatgaaggagaggttctggaaatcattcctgaagagacgtttaaagagtctgatgaagacggcatgttcgtcggctatacggacaattacatgaaagtcgtcttcaaaggcacggaagatgtaatcggcaaacttgtcaaagtcaaaattcaaaaagcgggctatccgtataacgaaggacaattcgtccgcgtcgttgaggatgaaatgacccgaaacatgcgcatgtcttcataacagataaaaaaaccggtgccttcccgcatcggtttttttacggtttcggaggaatcagcctgtcaatcagccggtaaaacaaatgtgtgaacggcagaaacaataaggcggtgactacgttaaataacaggctgaaatgcgcaatcatctgcgcgggatcatcagacaggcgctccgtaaaacctgctgatgcggacaggaagggaaatacgagcagcacgccgagaatattaaacacaacgtgagcaccggcggtctgtctggcggcataaccgcctgaaacagcagccatgacggccgtgacgcatgtcccgatattagatcccagaacgacgctgaccgcttgttcaatgccgatcaccccttcgttcataaaactcatcaaaatgccgatgcagacggagcttgaatgaatgattgccgtcaatatcatgccgataaaaagagcggaccagctcgaatcattcacatgccgcaaaacctccgcccccgccttcatttctgtcagcggaacggcgagccggctgaagcatgtgatgcaaaaaaagatgatgccgagaccgaggaagcttatgccgatctgcctgaacggatatttacggaggaggataaacacaaggcctccgataaaaagcacccaaatgagcacatccatctttatggctaaaaactccgtcgtaaacgtggagccgacattcgtgccgagaatcatcggaatggtccgtttaaaagataaagcgcctgcgctgacaaagccgatgacaatgaccatgaaggctgagctgctctgaagaaaaccggtgaacacgatgcttatgagaaaagctttcaaagggtggtcggtaaataagagcaggcttttctcaatttttgaatacgttaatgcgatcagccccttcctgagcaggctcattccgagtaaaaaaaccaggataagtgcggtaaagagaatcagtatcatcaaacgaaacacccctttccatcattatatagacaagcagccttattcatgacggaaaagtgagctcgcttagttgacctgactgatggcttatattataatgtcaaagtacatgtttatatatgtatctttttaaaggtagtcgattggtgtattcggagggagggaaagagaatgtcaaaaacggtcgttagaaaaaacgaatcgcttgaagatgctcttcgtcgcttcaaacgcagtgtatcaaagacaggtactttgcaagaagcaagaaagcgcgaattttatgaaaaacctagcgtaaagcgcaagaaaaagtcagaagctgctagaaaacgcaaattctaaaagagggtggatttatgagtcttcttgagcgacttaaccaagatatgaagctgtatatgaaaagccgtgagaaagacaaactgactgtcgttcgaatggtgaaagcttcacttcaaaacgaagcaattaagcttaagaaagacagtttgaccgaggatgaggaacttactgtcctatctcgtgaacttaagcaacgtaaagactccctccatgaattttcaaacgctaatcgtttagatttagtagataaagttcaaaaagagctggacattttagaagtttatttaccgaagcagctttctgaagaagagctgcagacaatcgtaaatgaaaccatcgctgaagtcggtgcgagctccaaagcggacatgggcaaagtgatgagtgctattatgcctaaagtaaaaggtaaagctgacggcagcgtaattaacagacttgtcagcagtcaattatcttaattgacaagaaaaaagacatctttccttgagagatgtctttttttatacataaaaaaatgaaactaaagtacatttgttacgtatataaagaagaacgaaacgggaaggagggtatatttgccttgttccgaaaaaaaaccggaattgctgttgctctattgggcttatttgtattatctttattaggggttcaattgaacgcgaaagctgatcacccatcggtttatgtcatcccggttgagaaaaatgtcgaacaggggctcgcctcgtttttatcgcgttctttcaaagaagcgaaggagtccggcgcgtcacacattattcttgacatcaatacaccgggaggcgccgttcaatcagccttggatattgcggatatcatcggccgcgcggatgtgcctgttaccgcttacgttaataaacgggcgctttctgccggagcgtatatagcgctccaggcagatgaaatctatatggcgccgggcggaaaaatgggtgccgcagccatcatcgacggaaagggaaacgcggcagacaaaaaggcccaatcactgtggcatgcagaaatggaggacgcagcggttaaaaacaaccgaaatccgaaatacgccctggccatggcagatcccgccattaatgcaaaggaagcgggcgccccaaagggaaaactgctgacactgacagctgaaaaagccaaggaagtcggatattcggagggcacggtttcagaccttgatgctttatatacaaagctcggttttgacaaagcggatgttcaccatgcagaagaaggtttcgtcggcaaactgggcagatggctgacaaatccgtttgttgtccccgtcttattaacgcttgctttgcttggtttgaccattgaattgttctcgccgggcctcgggataccgggtgccgtcggactgacggccatcctgctgtttttcaccgggcatatcgctgccggattcgccggctatgacagcgtattcttattttgcgcgggcttggtttttatccttttagagatatttctgcccggaggcataatcggtcttatcggtattgcaggcgtcatcgcgagcctctttctcgctgcgggcagctttaccgtaatggcggtttctctcttgatcgccattgctgtgtctattacagcctttatcatattaacaagggtgttggggaaacgaatgaaattctttaaaaaattaatattaactgattcaacaagcacggagagcggttatgtttcaaatcagaaccggacggagctgttgggaaaagtcggcgttaccgctacagccctcagaccgtcaggcaccgtcattattgatgatgaacgtctggatgtcgtctcggaaggatcattcactgaaaaagacagacaggtgaaagtagtgaaagcggaaggctcacgcattgtcgtgagagaaatatagatgataaccttgaggaggaattagatggaactgtcaagtttggcgattttagcattagttgctgctgccattattgtgttagccatattcttcacctttgtaccggtgatgctatggatttcggcgcttgcggcaggagtcagaatcagcattttcactttggtcgggatgaggctgcggcgcgtcataccaagccgcgttgtcaatccgttaattaaagcgcacaaagccggcctgtccgcaacaacaaaccagctcgaaagccattatctggccggaggtaatgtcgacagggtggtcaatgccctgattgcggcacagcgcgccaatattgagctgtcatttgaacgctgcgcagccattgacctggccggacgtgacgtattggaagccgtacagatgagcgtcaatccaaaggtcattgaaacaccgtttattgcgggtgtcgccatggacggaattgaagtaaaagcaaaagccagaatcacggtaagagccaatattgagcgccttgtcggaggagcgggagaagagaccgttgtcgcccgtgtcggagaagggattgtctcgacaatcggttcttcacacaatcataaaaaagtgcttgaaaaccctgatatgatttcgcagaccgtacttggcaaagggctggattcaggcaccgcatttgaaattctttcgattgacatcgccgacgtggatatcggcaaaaacatcggagcgattcttcagacggatcaggcagaagcagacaaaaacattgcgcaggccaaagccgaagagcgccgcgccatggcggtcgcccaagagcaggaaatgcgcgctcgcgtagaagaaatgcgtgcaaaagtcgtggaagcagaagccgaagtgccgcttgcgatggcagaagcgttgcgtgaaggaaacatcggcgtcatggactatatgaacatcaaaaatatcgacgcggatacggacatgagggattctatcggcaagctgacgaatgaccagcaagatgaagaccaacaataacctctctattaaggagggagccgctatatgcacgagattctgacaaatccgctcgtcattgccgccgtcatcggcattatatcggcaatattcggcaagaaaaacaaagatgaaaaacgtccgccgggtacacgtcccggaaatcaggcaaaaaagcaggatcaaaaacagccgcagaaagagcataagccaaaagcggaagaattgcctgccgtttcagaagagaacccttttgagcaaaaaagaagggaagctgaaaagcgcctagcggagacggagcagatgtttaacgggcttgaacataagctgacatccgcacgcgcacgaaacgcgtctctgaagaaatcagccctcaaaataaataaagaaactgcggtccaaggcattatattcagtgaggttttgggcccgccccgtgcaaaaaaaccgcaccggaccacgcggaacatcggtaaaaaataaagtgttagaaccccttttcaaatcatacatatgagatgaaagggggttctttttttatggggcaaagaaagaatcgtgtaaaggcatggctgacaagagcattggaaattcccccggacgttatgatggatctgcctcgtattacgatggtcggcagacttcatatctacatagagaatcacagaggcctcctgctgttcagtgaagaagaagtcaggctgatgctcaagcaggggcagtgtatcatatcaggaaaaaacttggtcattaaggcaatccttcctgaggaaatccttttggaaggcacgatagatcacgtacgatatgtcgattcataaagccggggggaaataatgtgaaaaacaaatggctgtcatttttttcgggtaaagtccaagtggaagtcaaaggaaaagggattgaacggctgctgaatgaatgcacgagaaacggaatcgccatctttgcggtgaaaaaaaagaaagactgtgttctgctgatgattcagcttcaagatgtacatgctttcagaagagtcatcagaaaacatgaatgcaaagcaagctttacaaaaagaaagggtcttccctttctgcttctcaaatcaaaattaaatctgggcttcactgcgggatttgtgatattttttgttatattgtttcttttgtccaacatgatttgggaaattgatattaaaggggccaagccagagaccgagcatcagatggtaaagcatcttgaagaaatcggtgtgaaaaaaggccgtttgcaatttttaatgatgacgccggagaaaattcaaaaatcattaacaaacggcatcgataatattacgtgggtcggtgtggaattgaacgggacagcccttcatatgaaagtggtcgaaaagaacgaaccgacaaaagaaaagtacgtaagcccccgccatatcgttgccaaaaagaaggcggtcatcaaaaggatgttcgtgcaaaatgggcagccgatggcttttgtgaacgatcatgttgacaaaggacagctcctcgtctcaggactgatcggaaatgaagaccggaaagtcgcctcaaaagcggaaatttacggagaaacatggtacaagtcagaagtaaccgtgccccttgaaacatcatttacgctatatacgggtaaagtaaggacgaagcacaagctgtctttcggatcatggggcgtgcctttttggggctttgaatttaatgagaagccgctgaaacatccgaaaacagaggaagaaaagcatccgtttcaatttctggggatgaagcttccggtttcttacgtttcagaacagacaagagaaagtgaaacatccgtgcggacttatacgaaaggcgaagcggttcaggccggtatcaaaatgggaagacaagatgtagaaaagcgattaaacggcagcggagaggtggaaagtgaaaaagttttgcaccaatccgttgagaatggtaaagtaaagttgattattctctaccaagttatagaagatatcgttcaaaccacacctattgttcagggagactaaagaatggcagaacatttacttgcgattaatcacaaactgaaaagcccggacgaagcactttctttgttcggcagccaagatgcctttttacatttaatggagaaggatctgggcattagcctcatcacacgcggtgaaaccatttacgtttccgggaatgatgaaacatttgagatcgctgacagattattgggctcgctccttactttgattcgcaaggggatcgagatttcggaacgtgatgtgctgtatgccgtgaaaatggcaaaaaaagatgaactggactattttgaaagcatgtatgaagaggaaataacgaaaacggcaaaaggcaaaccgatccgtgtcaaaaccatcggccaaagagaatatgtggcggcgatgaagaaaaacgacatggtgttcggcatcgggccggcgggaaccggcaaaacttatttggcggtcgtaaaagcggtgcacgctttaaaaaacggccacattaaaaaaattattttaacaagacccgctgtggaagccggcgagagcctcggttttctgcccggagatttaaaggaaaaagtagatccttatctgcgcccgctgtatgacgcgctccatgatgtgctcggaagcgaccatacggagcgtcttatggaaagaggggttatcgaaatcgccccgcttgcctatatgagagggcggacgcttgacgacgcgtatgtgattcttgatgaagcccagaataccacgcccgctcaaatgaaaatgtttttgacgagattgggttttggctctaaaatgatcattacgggcgacgtaagccaaattgacctgccgaaaggcgtcacatcgggacttgcagtagcgaaggacatgctgaaggacgtaaacggcatctccgtgattgaacttgaccagacagatgtggtcaggcatccgcttgttgcaaaaattattgaagcttatgataagcaaaagtaatgcaaaaatgacccgatctcccgttatcgggtcatttttatatgatgtgttcctgatgtttcagggaggaggttcttgttttgaaaaagaagggaaagggcaaaagcgcccgggtacggttccgcagtttcagacatgcccgctcagcccatgtgctgctgtacctgctgctttcagcgatcatgtttggtttgctctttattcatgtaaaacctgaatcacttaatttggatttgtttgcagtcagtgataagacgatttacgcgcccgccacagtggaagatcagcaggcgacggaatcgaaaaaacaggcggccgaagatgcggtggaagatcaatacactctgaaaaaaggctataccgacaaccggcttgacctgatcacttccatttttgacagcatcggcgaagtaaaaaaagatgcggaaaaagacaaaaagtcaccttcagaaaaatcactggtaaaatcggtgaaaaacaagctgacacaggatgtcaatgaatccgtctcggaagatgccattaaatcgcttctccatgcaaacaatgaagatttctcatttgtgagggattccgtcattaccgcggtgaatacggtgatgagcagtgaaattccttctgaaaagcttgctgaagcgaaggataaggtcgcaaaagagctgaaaagcgcttctgtgccgtcaaaatatttagcggctgcgactgaaatcggaaaatacgcggtcatcccgaattacgtatttgatccgaaagcgaccgatgaaaaacgccaggaagcgtcagacagcgtccagccggtacagatcaaacagggacaggttctcgtggaagagaatgatctgattgaccgggaagtatacaggaagcttgaactgacgggtcttttgaataattccaacctgttaaaaccgatcagcggtctccttctgatgatcggcctgtttattgccacgcttgtctactattttgagaaacagcagcaggagcttaagctgaaaaataaatctcttttgctgttttctatcattacaacgcttattctcgtcattatggaagtcgtcagtctctttcagaagattgaatacaccaatatcggctatcttgtgccgatcgccgccggcgcgattttaatcaggctgctgctcaatgaaaggctcgccattttaggaagcatcattctggcgatctgcggcagtatgatgtttaatcagggtgtgacgggaacatttaattacgtcatcggcatttactatttaatcagcagcatttcaggcattttgtttttgggaaaacataatgcgagatcaaaaatattgcagacgggactgttcgtctcatttattaatatgattatcgtgctgtcgcttttattaatacaaaatacggcgctgtcaccggttgaaatcggaacgcttatgctgatgggggtcgtctcgggacttgcttcatccgttttgattatcggtctgatgccgttttttgagacgggattcggcattctttcaacaatgaggctgattgaactgtctaatccgaatcatcccctgcttcgaaagattttaacggaaacacccggtacatatcatcacagcgtcatggtggcaaatctgtcggaagcggcttgtgaagccgtaggggcaaacggtcttttagcacgggtcggagcgtattatcacgatctcggaaaaacgaaacgtccgcaatattttattgaaaatcagatgaatatggataatccgcatgacaagctgtctccgcagctcagcaaaaatatcattatcgcacatacgacagacggtgcgaatatgctcagaagctataagtttccgaaagagcttgtggatatcgcggagcagcatcacggaacgtcccttttaaaattcttttattataaagcgaaagaaaagggcgaccagattacagagaaagagttccgctacccggggccgaagccgcaatcgaaagaagcggctattatctcagtggccgacagcgttgaagccgccgtccgttccatgcataatcccaatcccgagcggatcgaaaaactggtgcggggaattatatccgataagcttcaggacggacaattctcagaatgtgatctcacgttccgagaactggatacgatcgcaaaaacactatgtgcgactttaaaaggaattttccactcccggattgaatatccggaggctacgaagaaggtgaaataaatgagtttactcatagatattgttgatgaaacgaacagcgtctcagctgatgcgcttcaagaagtggagaagctgctccaattcgcggcggaaaaagaaggcgttcaggaccaggctgaagtatcggtcacgattgtgacaaatgaggaaatcagagaaatcaacagagactaccggggaaaagacactccgactgacgtcatttcgtttgcgcttgaagaagaaggcgaagacgaggttgaaatcgtaggcgccgacatgccgcctgttttaggagatattatcatcagcgctgacagaacgaaagagcaggcggaagagtacggccattcgtttatgagagagctcggttttctggccgtgcacggctttttgcatttgcttggctatgatcacatgacaaaagaagaagaggaagaaatgttttcaaagcaaaaggatttgctggatgagtatggactcacgagatcataaaaacgagtggagcaggttcctgaagagctttgtccatgcatggaggggaatctggaaaacggcgcggtcagagcggaattttcaatttcatattaccgcggcctgcgccgttatcgtttgcggttttctcaccgggctgagcacagccgaatgggccgttgttttggtgctgatcggagggatgcttgctttggagcttttaaatacggcgatagagcatgttgtggatttagttaccgatcagtatcacccgctcgcaaaagcggcaaaggacgcggccgccggagccgtttgcgtctttgccgtgatatcgtgtatcattggtttactcatcttcttgccgaagatatgttagcagaagattcttacaattattttacattgccaaaaatgggcgtgaaaaaccaatcataattatgtaaaataaaagtgacagcggtatcatacaggataaaggtaagagaggaattaagtacacatgaacagacaagaattgattgcagaagcattaaaagcgcgggacacagcgtatgtgccgtattcaaatttcagagtgggagccgctcttcttaccaaagacggaaaagtgtacagaggctgcaacatcgaaaatgcggcatacagcatgtgcaactgtgctgaacgcacggcaatattcaaagctgtttccgagggggatacggaatttgcgatgctcgccgtggctgcggatactccgggaccggtttcgccgtgcggagcctgcagacaagtaatttccgagctgtgctcaaaggatatgcttgttattctgaccaacttacaaggacaaataaaagaaatgactgcggaagaattattgccgggcgcattttcatcggaggatttacatgacgaacgaaagctttaaatcaggatttgtatctatcatcggaaggccgaatgtaggaaagtctacctttttaaacagggtcatcggtcaaaagatcgccatcatgagcgacaaaccccagacgacaagaaataaagtccaaggggtgctgacaaccggcacgtcgcagaccatttttattgatacaccgggcattcacaaaccaaagcacaagcttggcgactttatgatgaaagtggcgcagaatacgctgaaagaagttgacttggtgttatttatgattaacgccgaagaagggtacggaaaaggcgacgagtttatcattgaaaagctcggacagacgtctacaccggtttttctgatcgtaaacaaaattgataagatccaccctgaccagctgcttcttttaattgatgagtaccgtacgcgctatccgtttaaggaaatcgtgccgatctcagctttggaagggaacaacgtcgaaacccttctcgcgcagattgaagcgtatttaccggaagggcctcagttctatccgagcgatcaggtgactgaccatcctgagcggttcattatttctgaactgatcagagaaaaggtgctccatctgacaagggaagaagtgccgcacagcatcgctgtcgctatcgagtccattaaagggcaggaaaacggctccgtccatgtcgctgccaccattgtggtcgagcgggattctcaaaaaggcatcgtcatcggcaaaaaaggagcgcttctgaaagaagtcggcaaaagagcgcgggctgatattgaagctcttttgggctcacgcgtttacctggaattatgggtgaaggtgcagaaggactggcggaataaaatgtctcagctgcgtgatttcggcttcaaagaggatgaatattaattcatctaaggcgcatgcctgaggtgtgagattacctcacagaagcagggattcgttagcaaaatttgtttaacatgaaaaggaggacatcaggtcaagataagggtaagaatttggatttgcaagctagtttaatgatgaaaggtgggttttttgtgttgaattttacctggaacgtattttctcaaacaggaagtgttgatacgtaccttctttttaaagaactggaaaaagagaacctggaaagacccgaagaaccggaagatgagctagcccgaattgattttccaattttgtaaacctcttggcccctcccattgttggaaggtgcggaaatgctgactaaatgtgaaggaatcgtgctccgtacgaatgactacggggagacgaataaaatcgtgacattgctgacgagggaacacggcaaaatcggcgtcatggcaaggggcgccaggaagtcagccagccggctgtcagcagtcagccagccgtttttgtacgggtcatttttaatgcaaagaacatccggactcggcacgctccagcagggtgaaatgattctcagcatgagaacgatcagagaagatttatttttgacggcgtatgccgcttttatcgctgaactcactgacaaaggaacggaagagaagaaaccgaacccctatttattcgaattgattctcgaatcctttaagaggctgaatgacgggactgacccggacgtgatcaccttcatcgtgcagatgaaaatgctcggcgtcatggggctgtatccggagctgaatcattgtgtccactgcaaaagcggggaagggacgtttcatttttcgataagagataacgggtttatctgccaccgctgctttgaaaaggatccgtacagagttccgatttcgccgcaaacggcaaggctgctaaggcttttttattactttgatatcggaaggctcggcagcgtctcgttaaaacaggaaaccaaaaatgaaattaaacgggtcattgatctgtattacgaagaatattcaggactttatttaaagtcaaaacggtttttagatcagatggaaagcatgaagaaccttttggatgaaaacaaaagttgacattctgcccatctttttatatgatcatttattataaaatatgttgcagtgacagaaagaagtacttgcgtccaactcatacaagcgaccttagggcagtgtaagctaaggatgagcgcgcaacgaaaggcattctcgagcaaccctttaaaaagaggctgagtgattcacatcctcagcaactagggtggaaccgcgggagaactctcgtccctatgtttgcggccggcaagcatagagacgggagttttttggttgccgccgcacttgtaaaagaatggagaaagtggaggtgcttgaaatgaacattcaagatatgattttaaccttgcagaagcactggtcgaatgaaggctgtgtgctcatgcagtcgtacgatgtggagaaaggcgcaggcacaatgagcccgtatacatttttacgaagcatcgggccggaaccgtggagagtggcttacgttgagccgtccaggcggcctgcggacggacggtacggtgaaaacccgaacaggctctatcagcatcaccaattccaagtcattatcaagccgtcgcctgataacattcaagagctttaccttgattcattgcgtgcgctcggcattgacccgcttgaacatgatatccgtttcgtagaagacaactgggaaaacccgtctttaggctgtgcaggtctcggctgggaagtatggcttgacgggatggaaattactcagtttacatacttccagcaggtgggcggaattgaatgtaaaccggtatccgttgagatcacatatggtattgaacgtctcgcgtcatatattcaggataaagaaaacgtctttgatcttgaatggacgtcaggatttactgtgaaagatttatttatgatggctgaatatgagcattccgtttatacttttgaaacatctgacgtggatatgcttttccatttgttcagcacctatgaaaaagaagcgatcagacaaatggataacgggctcgtgcatccggcctatgattatgtgctgaaatgctcccacacatttaatctgctcgatgcaaaaggcgcgatctcggtgacggagcggacgggttatatcggccgtgtccgcaacttagcgagaaaagtggcaaaaacgtattatgaagaacgggaaaaattagggttcccaatgcttaaagaggagggctcttcccatgagtaaacaagacttgcttttagagatcggactcgaggaaatgccggcgcggtttttacatgacagcatggtgcagctcggtgaaaagctgaccggctggctggctgaaaaaaatatcgcccatggcgaagtgaaactttttaatacgccgagacgtctggcagtatatataaaagacgtagcagaaaaacaggctgatattcaggaagaagcaaaaggccctgcgaaaaaaatcgctctggatgctgacggaaactggacaaaagccgctatcggattttcaaaaggccaaggcgccggagtggatgatctgtatataaaagatgtaaacggcacggaatatgtcttcgttcaaaaattccaggcgggacaagagacgaagacacttttaccgcagctggaaaatttgattgccggaatgcattttccgaaaaacatgcgctggggcacgcaggatctgcgctatgtccgtccgatcaaatggattatcgctctctttggaaaagacgtcatttcgtttgaaatcacaaatgtcgagacgggccggaacacacagggacaccgctttctcggccaagaagtatctgttgatgcgccgtcatcatatgaaaagctgctgaaagaacaaagcgtcattgctgacccgaaagaacgcaaacaaatgatccaaagccagctggacgcgcttgcagccgagaagaaatggaacattccgatcgatgagaacctgctgaacgaagtcaaccatctggtggaatacccgacggcgctttacggatcttttgaatccgagtttctttctattcctgaagaagtgcttgtaacaaccatgaaagagcatcagcgctacttcccggtaaaagatgaaaacgggaatctgctgcctcattttattacggtaagaaacgggaacagccatgcaattgaaaatgttgcccgcggaaacgagaaagtgctgagagcaaggctttcagatgctgcgttcttctacaaagaagaccaaaagctcaacattgatgaaaacgtgaagaaactggaaaatatcgttttccatgaagagctcggctcccttggagataaagtaagaagagtggccgccattgcgggcaaacttgccgtccgcctgaaagcggatgaacagacgcaaaaccttgtgaagcgcgccgcagagatttctaaatttgacctggttacacatatgatctatgagttccctgagcttcagggcgtgatgggagaaaaatatgcgcgcatgctcggtgaagatgaagccgtcgctgccgctgtcaatgagcactatatgccgagagcggccgggggagaagtgccttcaaccttcaccggcgcggttgtggcgttagctgataaactggacacgattgcttccttcttcagcattgacgtgattccgacaggttctcaggacccgtacggattgcgccgtcaggcaagcggcatcgtttccattctgatcgaccgcaactggggcatttcttttaaagagctgctgtcattgacagaaacggaaaaagaaaatgagctcctcgatttctttacacagcgtctgaaatacgtcttaaacgctgaagacatccgtcatgacgttatcgaagccgttctggacagcacagagcttgagccgtatgcagccgttcataaggcaagagtgcttgagaagcacctcggcacacccggctttaaagaaacggctgaatcactcggccgggtcatctccatcagcaaaaaaggcgagagccgcgatatcaatccggatctgtttgaaaatgaacaggagaaaaagctgtttgacgcttatcaacaaacaaaagacagtatcgcggaaagctttgcctccaaaaactatgaacaggcgcttgccgtgctcagcggattaaaggagccgattgaagactactttaatcacacgatggtaaatgcggacgatgaagcattaaaaaccaaccgtttagcgcaaatgaccgctcttgcagatgtgatcaagtcttttgctaatatgaatcatcttattgtaaaataaagaaaaagacggttgctgtgtgatcggcaatcgtcttttccccttttacataaacatcacagaatgaaaacatagataaagaaacccttccataaaggtggtgagtacgatcgaattaaataaacggcaagaacaaattttacagattgtaaaggaaaacggcccgattaccggagagcatatcgcagaacagctcaatttaacgagggccacgctgcggccggacttggccatactcaccatgtcaggcttcttagaggcccgtccgcgggtcggttatttttatacggggaaaacgggaaatcagctgcttgcggataaactgaaaaagctgcaagtgaaagattttcaatcgatccctgttgtcatcaatgagaatgtctcggtatacgatgccatctgcacaatgtttttagaagatgtcggcacgttatttgtcgtagatcgtgatgctgtcttagtcggtgtgctgtcacgcaaagatttgctgcgggcgagcatcggccagcaggaacttgcctcaataccggttcatattatcatgacaagaatgccgaatatcgccgtctgccggcgtgacgattatgtgatggacatcgccaagtatttaattgaaaaacagatcgatgccctgcccgttattaaagatacggataaaggctttgaggtcatcggccggtttaccaaaacgaatatgactaagatacttgtcagtttatcagaaaatgaaatcatataagcttgaaaactaacggggggataacatggacaatcgcatcatttatgtagtatcagactcagtcggagaaaccgccgaactcgttgtaaaagcctcgctcagccagtttaacggctcagcagatgatacgcatatcagaagaataccttatgtggaagatatcggcaccattaatgaagtcgtgtctctcgccaaagcggacggcggcattatttgttttacgctcgttgttcctgaaatgcgcaaatacctggttgaacaagcggaaaaagcgaatgtgctgtattacgatattatcggtccgctcatcgataaaatggaatcggcttacggtctgaccgctaaatatgaaccgggccgcgtccgccagcttgatgaagattatttcaaaaaggtcgaggcgatcgagtttgccgtcaaatatgacgatggcagagatccaagaggcattttaaaagccgatatcatcctgctcggagtatccagaacgtctaaaaccccattatcacaatatcttgcccataagcgtctgaaagtggccaatgtgccgatcgttcctgaggtcgatccgccggaagaactgttcagcgttgatccgaaaaaatgcatcggcttaaaaatcagccctgataaactgaatcatatacgaaaagaacggttaaaatctctcggcttaaatgacaaagccatttacgccaatatcaacagaattaaagaagagctggagtatttcgagaaaatcgtggaccggatcggctgccaagtcgttgacgtttcgaataaagcggtcgaggaaacagcgaacatcattcatcacctcaaaacaaagggccgataactcaggacgctttatcctgggtttttgggtatgcaaatagggaataaacaaaaaggatggcatcttcgcgaagtttgtattataataaaaaattgtgataaaatgtttatttttaggtttaagcttcgtgtgatacgaataaactattatgggtaagatgtcaagaataactcccggaaatttttcgacaaagctcaaaatagatccgcagtcatggagcatatgcgatttcgcttgtttttatgcaggagattgatggagggatggagaattagtcttctaaatgaaaaagaaaagacgatttttgtcgatgcagacgcatgccccgtaaaagaggaaataatgctcattgcatcgcaatacagcgttcgggttattttcgtcgcatcatttgaacactaccagctttccagaagcaaagacgagaactgggtatacgttgatcctcataaagaagcggcagacttatatatcgcaaaccatgtgagatcgggagacgtcgtagtcacgcaggatatcggtttagcctctcttttgctgaacagaaatattgccgtcttatcggaaaggggccgttcttatactgaagacacgattgacttcgctctgatgagccgtcatatgtcaggcaaaatgagaagaagcggcattcattccaaaggacctaaaaaattaaataaagaagatcggaatcgatttgttaccctgcttaaaaaaatcctgtcgaatgatgaagggatttcaaatcaaaacatcgaataatgtacgacggagtgttataagatgggaaaccgcataccagatgaagtagttaatcaggtgcagcagtcagcagacattgttgaagtcataggtgattatgtccaattgaaaaagcaaggccgcaactactttgggctctgtccgtttcacggggaaaacacgccctcgttttccgtctccagcgataagcagatctttcattgcttcggatgcggtgcgggcgggaacgttttctctttcttacggcagatggaaggctattcatttacggaggctgtttctcaccttgcggataaatatcagattgatttccctgatgatataacgattcactctgcatccaggcctgaatcttccggagagcagaagatggcggaagcccacgagcttctgaagaaattttaccatcatttgctaataaatacaaaggaaggccaggaagcgttagattaccttttatcaaggggttttacgaaagagctcatagatgagtttgaaatcggctacgcgctggattcctgggatttcatgacgaaattcttgaaaaagcgcggttttgaggaagaactgatggaaaaagcgggtctgctgatcagaagggaagacggcagcgggtattttgaccgtttcagaaacagaattatgtttcccattcatgatcaccacggagccgtggcggctttttcaggaagggcgctcggaagccagcagccgaaatatatgaacagcccggaaacgccgctgtttcataaatctaagctgctgtataactttcataaggcgcgcctgccgatcaggaaagaggagagagccgttctgtttgaaggcttcgctgacgtcatatccgccgtcagctcaggcgtaaaagaaagtatcgccacaatggggacgtcgctcaccgaagaacatgtgaaaatcctcaggagaaatgttcaggaggtcattctctgctacgattcggataaagccgggtacgaagctacgctgaaagcggccggcctgcttcagaaagccgattgtaaggtaagagtaagcatgctgcctgacgggcttgatcctgatgattatatcagaacccggggcggagaaaaattccggaccgatatcattgatgcaagcgttacggtcatggcttttaaaatgcagtatttccgcaaagggaaaaacttatctgacgaaggagaccggctcgcttacatgaaagaagtgctgaaagaaatcagcgctctttccgggtcgcttgagcaggaaatgtatgtgaagcagctcgcctcagaattttctctttcggtagaatctttgacggaacagctttccatctacgccagacaaaacgcccccggcgacaaaaacgccgaaccgcagacaagacgggcccgggtgacgacaaaagcaaaacggcgccgtctccgtcccgcctatgagaacgcggaaagacttctgctcgctcatatgctgagagaccgaaacgtcataaagaaagtgattgagcgtgtcggctttgaatttaacattgacggacatcgtgcgctggcagcatacctgtacgctgtatatgaagagggggctgacatgacgccgcagcatcttatggcgagagtgcaggatgaggaaatcagccagctgctttcagatatagggatgctccaagtaaacgaggagctctcagaggccgagttatccgattacgtaaaaaaagtgttggatcaccgaaaatggtcaatgataaaggaaaaagaagcagaaagagcggatgcggagaggcagaaagacttcgtgaaagctgcgtctctggctcaagaaattgttgcattgaaccgatcattaaagtaacaccacaaagaggcttgcgttctgattggcaatgattccttgcggaggagcaaatagatcgcttaacctcatcatgaattgtcatttattatccgcagccctgcatgctgaaaaagagagaaggcttccgggtcggataagaaacataccgcttttagaattcgttgcaagctttggaaggagggatccataatggctgataaacaaacccacgaaacagaaacagaacttacattagaccaggtaaaagagcagcttactgaaactggaaaaaaacgtggcgttttaacatatgaagaaattgctgaacgcatgtccagctttgaaattgaatcagaccaaatggatgagtattatgaatttttaggagaacaaggtgttgaattaattagtgaaaatgaagaaacggaagatcctaatattcaacagcttgccaaagccgaagaagaatttgaccttaatgacctcagcgtaccgcctggcgtaaagatcaatgatccagtccgcatgtaccttaaggaaatcggacgggtaaatcttctttctgctaaagaagaaatcacctacgctcaaaaaattgaagagggtgacgaggaatctaaacgcagactggctgaagcaaaccttcgtttagttgtcagcattgctaaacggtatgtcggccgcggcatgcttttcttagacttgatccaagaaggaaacatgggtctcatgaaagccgtcgagaagtttgactaccgtaaaggatataaattcagtacgtatgcgacttggtggatcagacaggcgattacacgcgccatcgctgaccaggcgagaacaatccgtatcccggttcacatggtggaaaccatcaacaaattaatccgggtgcagcgtcagcttcttcaggatcttggcagagagccgacaccggaagagattgctgaagacatggatcttacacctgaaaaagtccgtgaaatattaaaaattgctcaagagcctgtttctttagaaacgccgatcggtgaagaagacgactcacatctcggtgacttcatcgaagaccaggaagcgacatctccgtcggatcatgcggcatatgagcttttaaaagaacagctggaagatgtgctggatacgttgacagatcgtgaagaaaacgtgctgcgtctccgtttcggtctggatgacggacgcacaagaactttggaagaagtaggcaaagtgtttggagtaacgagagagcgtattcgccaaattgaagcaaaagcgcttcgcaaattgagacatccgagcagaagcaaacgtctgaaggattttctcgaatagaatggaacgggtctttttgatccgttcttttttatgtataagatatatggataatatacctttattttactggataagcatatgttttgcaaatgagtttggaaaaaatgcggcatgtcctgaaagggggaaaatgagataagtttatttatattctttattgtaagcgtatacaattcattatacaatagaataaagataattttgtgataaacaaaacagttatttttgctttttgtataaattgtgaaatcaatgaaattgctgagcaagaccatttactttttgtaaaaataagttagaattagaagtgtttacatagggggagaatgaaaaagggggatggagatatgaagtggaatccgctgattccttttttgctcattgcagtgctgggaatagggctgactttctttttagctgtaaaaggcaatggagatgcgcatcagatcgcaagcggcggtgaaagcaaaaatgccgagaaggaaactgcaaacgcttcacctgaagagatttataaagcgaactgcatcacctgtcacggggaaaactatgaaggtgtttcagggccgaacttaaaaggcgtcggcaaaagaaaagatgtcgctgagattaaaacaaaaattgaaaaaggcggcaacgggatgcccgcaggccttgtgccggccgaaaagctggatgacatggcaaaatgggtttctgacattaaataaagctttaccggtccctatataaaagacatatgaaaaactctatccgccgcttggattccgggcggtttttttatatgatagtaaaggaaaaagaacctgagaaaagttgtgatattgtgaatgaaatgaagttatctaaaagattgcagtctgtggcggaatatatccctccgggtgcgctggttgctgatatcgggtcggaccacgcgtatcttccttgctatgccgttttgaatcatttggcaagccgggcaatcgccggtgaaattacagacggaccgtttctatccgccaaacagcaggtggaaaaactggacttaagcactcttatctccgtaaggaaaggtgacgggctgagcgtccttgaaaaaggagaagccggcgccattacaatcgctggcatgggcggagcgctgatcgctcatattttggagtccggaaaaacgaaattgacggggcgtgaacggctgattctgcagccgaatattcatgccgttcatataagagagtggctgtatcaggaaggctatgaactgattgatgaagtgattctcgaagaagacggaaagtgttatgaaatcctcgttgcggaaactggcgaccgtgatgcgccgtatcgggacgtgccgatggctgccggaatgcttgcgggtccgtttttattaaaagagaggaatgaagtgtttcttcggaaatggagccaggaacttaagcatactgaacaaatttatgaacagatcagccgcagcgcaaagcatgaaagtcatgaaaaattagctgaattgaaagagcggatttctctgctgaaggaggtaatcggacatgcctaaacatgtgaacggacaggaaatcatccagctgtttgaacaattttcaccgaaggcttttgcggtggaaggagataaaatcggcctgcagatcggtacattgaataagccggtgaaaaatgtcatggtgacactggatgttctggaacaaacggtagatgaagccattgagaaaaaagttgacttaattatcgcccaccatccgccgatttttcggccgcttaaacagatcaccactgatcagcctggcggaagactgattgagaaatgtataaagcatgatattgccgtatatgcggctcatacgaatcttgatgtggcggacggcggtgtgaacgatctgcttgccgaagctctcggcctgacagacacagaagtgctcgtcccgacatattcggacccgatgaaaaagcttgccgtatatgttccgaaagactatgaagaagctgtaagaaccgcacttggcaacgccggagcgggacatatcggcaattacagccattgcgcgttctcctctgagggaatcggcagctttaagccgctggacggggcagaaccgtttatcggacagacgggagagctggaactcgtccatgaagtgagacttgagaccgtttttccggcaagtatggagaaaaccgtcgtaaaagcgctgaaaaaaagccatccgtatgaagaggtggcatatgatatttatccggtggagcagtctccgcttgaaaaagggctcggccgcatcggaaaacttcagcaagacatgacgcttgaagagtttgcgctgtttgtgaaagaaaagtttgacgttaacggagtccggatggtcggagagcgaaacagcaaggtgaaaaaagtcgcggttcttggcggtgacggaaataaatatatttatcaggcaaagcggaagggtgcagatgtttacgtgacgggcgatctttatttccatgtagcgcatgatgcgatgatgatcggattaaacgtcgtggacccggggcattatgctgaaaagatcatgagaaaaggcacggctgagaagcttacggcaatggccggggagaaaaactatgatgtgcgcattttcgcttccgaaacagatacaaacccatttaccttcttataaaaaaactgaggccccgggcctcagttttttatttttactttcggaaggatttttttaagcggcacactgtgttcaagctgccatgtcgattcatcgttgtggtcaaactgctctaaaaagcggatgacttcctttgtaatcggtgtcggtgttgatgcgcctgcggtaacggcgacggtattgacgtctttcagccattcgagcttcagttcactgatgtctccgattcggtaggcttttgttccggcgatttcttctgacacttgcgccagtctgttggagttattgcttttcggatcaccgacaacaatggttaagtccgctttttttgcctgctctgatacagcttcttgacgaacctgtgtggccaggcagatttcctgatggtattccacgtacgggtacttttctttgactgattccataatatcgtggacgtcccactgggacattgtcgtttggtttgtaacgattaatttctcagcctgaatatcgagatttctcacgtcttcctctgtttcaacgagatgaacgatttcaggagcgacgccgacggctccttcaggctcggggtggccttttttaccgatgtatatgacgtgataaccttcagcttttacttttcggattaagtcatgtgttttcgtgacgtccgggcatgtggcgtcaatcgtaacaagccctttttcctcagcggcttttcttacttccggagataccccgtgagccgtgaaaataacggttcctttttccacctgctttaaaatctccagacggtttgtgccgtcaagcgtgtaaatgccgtcttcctcaaacgcatctgtgacatgcttattatgaacaatcattccgagtatatatataggtcttggcagtgttttatcgagtgacgcgtttttggctatgaccatggcatcaacaacaccgtaacagtagccgcgcggcgatattttgataacgtccaatgtagatgtcctcctatcaaaagtgagtgtagaggcaatataaaaagccgtagttaaacggctcaaatcttgcattcttctgatctcattatagctaatctttcgtgagatatcaaagaatgttaaatatataatttcggctttgatctgcccgatgttctttttggacgttgctgttccgctgagtctgcctgtgcggcgtctttttcttttgaagcggatgctttttcagacgtcttctttgatgttttggatgaggcgtctgatttgttttcatcttctgtttcatctgttttttcagcttcatcctttttgtcctgttcgtctgtttctttcgtctcgtcagattcattctcgtcatcactgctgcttaattggctgtaaagcttcatcatggcgggcagactccgtactaaaggaccgtactgctggatcatcggcgtaacctgctgcgccacgccgagcaccttctgaacgttgccgagcatgctcgacagggatgccggacttgccaggttctgtattccctgcagtcctgcacctgctcctccgctggccgccgccggtgccgacgcggcagcgcttcctcctcctgaaccgggtaaaaaacgggaaagcatcccttttaagccccctccgccgcccgtgcctgcgtttctcaggcccgctccggcaatctgctgctgagggaaaagctgccgtccctgctgcatcagctgccgtcccggcaatgacggtcttcctcccatcatcatacgcggattcataaacggccggccctgctgcgccatatttctcatcggctgctgtggaaacatacttgtacctcctttctgtctctctgctattacaatatgcatcggagggggcatttgcttttctgtctcgaaaacaggattcccccaagacatggtgtttttaagtaaaatcggttataatgtgatgatggacacagaatgtgccgctttaaggagctgggaaaaatgaaagaaactaaatttgatggatacaacttaaaaccgtttattatagatgcagttcaccgccttggtttttatgaaccgacagatattcaaaagcgtctgatacctgccgtactgaaaaacgaaagcgtgatcgggcagtcccagacggggacggggaaaacccacgcctatttattgccaattttgaatcggattgatccgggttctgatacggtacaggctgttatcacggcgccgacgagagagcttgccaatcagattcatcaggaagcgctcaaaatcacacagggtgcggaagatgagccgatccggacaaaatgcttcatcggcgggacggacaagcaaaaatcaattgataagctgaaaacacagcctcatctcgtcgtcggaacgccgggccggatcgcggatctgattaaggcgcaggcattgaacgtctataaagcgcagtctctcgtcattgacgaagctgatctgatgcttgacatgggctttttagaagacgttgattacatcggatcgcgtatgccggaagaacttcagatgcttgtgttctcagctacgattccggaaaagctgaagccgtttttgaaaaagtatatggaaaatccgaagtacgcgcatgttgagccgaaaagaatcacagccgaaaagattgaacatgtgttggttccttctaaacagcgtgataaagacaaactgctttttgatatgatgtctcatctgaatccttatctgggcattgtgtttgcaaatacgaagaacacggctgaccatattgcgaaatacctgactgaaaagggcatgaggatcggtcttctgcacgggggattaacgccgcgtgagcgtaagaaggtaatgaagcagattaatgatctggaattcacttatgtcattgcgacagaccttgcggcaagaggaattgacattaaaggcgtaagccacgtcatcaactatgagcttccggacgatctggatttttatgttcaccgcgtcgggagaaccgcacgcgcgggttcatcaggccaggcactgaccatttatgagctttctgacgaagatgcgctcgtaagactcgaaaagatgggcattgtgtttgactatgcggagcttgtaaacggcgaatggaagaaaggcgatgaccgccaccgccgcaaaaaacgcaaaaaatccgagaatgaggccgaccaaatggcgaagcgcctcgtgaaaaaaccgaaaaaagtgaagccgggctataaaaagaaaatgggctacgaaatggaaaagataaaaagaaagcagagaagaaacaaatctaacaaaggaaagtaggggaatcgggttgctgaaaataggttcacacgtctcaatgagcggaaaacatatgctccttgccgcaagcaaggaagccgtttcgtacggggcgaatacatttatgatctatacgggcgctccccaaaacacgcgccgcaaaaaaattgaagacttgaatatcgaagcgggccgcgcccatatgaaggaaaacggcatcgacgagattgtcgtgcatgcgccgtacatcattaacatcggaaatacgacaaatccggcaacatttgagctgggcgttgattttctgcgttctgaaattgaaagaacggcagcgatcggcgcgagacagatcgtgcttcatccaggggcgcatgtcggagcgggggctgagacgggcatcaaaaaaatcattgaaggtttaaacgaagtgattgttcccgggcaaaacgtgcagattgcgctggagacaatggcgggcaaaggatcagaatgcggaagaagctttgaagagctggccgagatcattgcgggagtcacgcataatgaacatctatccgtctgctttgacacttgccacacccatgacgccgggtatgatgtcgctaatgattttgacggtgttcttaacgagtttgataaaatcgtcggcatcgatcggataaaagtccttcatgttaacgacagtaaaaatattaaaggcgcccggaaagaccgccatgaaaatatcgggttcggagagatcggttttgacgctctgcagtacatcgttcatcacgagcagcttgccgatattccgagaatcctcgaaacaccgtatgtaggcgaagacaagaaaaataagaagccgccgtaccgttttgaaatcgaaatgctgaaagaaaagcagtttgataaggagcttcttgaaaaaatatcagctcaataagaaagaaaggaggggcgggtgtccctcctttcttaccctgagaattgattgaaaagttcgtcaactttccgcgccgtttcttttgaagttatcgtttccacttttttcagcaggcgcagccgctcctgttcatcaaaaatattgatgttttttccgtgcatcagagccgctacctcagccgcttgacttcttgtaatgctgatcccgtattgcttggaatatttcagcagatcgtccgcagtgacttgattgagccgctgcaaaataattctttgtattaaaatcatcgatactttcacctctttagacataatgtattgagcagatcattaaaatgttacagcttttaatggtaaaataaagttgcttactgtttaaaatagttattataggaaaggagattttatgaccccaaataaacagcataaaagagaatcatttttacactttatcttcagggtcattatgattctgatcggggcgggttcagccgccgtaagtattgaattgtttctggtccctaataattttatcgacggaggcattatcggtgtttcattaattttagaccacctctttatgtccaatcccctcctcaattttgccttattcgttgtgttactcaacattccatttatgattttcggatataaatatatcggaaaaacatttctcatctctactgttatcggaatcgtcggtttagcgctgattgaatcctcattgcaccatgtggaggccattacgacccagcctattttggcgacggtattcggggggcttttgctcggtttcggggtaggccttgtcatccgaaacggaggctcgatggacggtactgaaatcctcggtatccttctcacgaaaaagctgcccttttcagtcggagaattcgttatgctcatcaatgtgtttattttcatttgggccggttttgtgttcggtccggagcaggcaatgtattctttcatgacttattatattgccatgaaaacgattgacgccgtcatccaggggcttgatgaaacaaaagcggtcattattgttgcagagcaatatgctgagatctcagatgctatattgcaccggcttggacggggaaccaccaagcttcagggaaaaggcggatatacggatgaaaccaaagaagtcatttacgcggtcgtgacaaggcttgaagtgactaaattgaaatccattgtgtttgaaattgataaaaacgcctttattacgatcatgaatacccatgaaacgaggggcggtaagttcaaaaccgcgattcactaggctttcatttacttttcatcattttataggtataatttgatacatcataagaaaatggcctgctgttcagacagctgccattttctttttggagcgataccgtgttgtaaaggggaggtcctcatgaacgtacaagaagcgttgaacctgctgaaagaaaaagggtataaatatacgagtaagcgagaagacatgctgcagctttttgctgattctgataaatatctgaccgccaaaaacgtgcttgccgtattaaatgacgactatccgggtctgagctttgataccatatacagaaatctttcgttatatgaagaactcggcattttggaaacgacggagctttccggagaaaaactgttccgttttacatgctcttatacccatcatcatcaccattttatctgtttaacctgcgggaaaacgaaggaaattgagtcctgtccgatggataagctgcacgatgatttggaagggtatgaaatcagcggccataagtttgaaatttacggcacctgtccggcgtgccgataaaaaacctcctgcttatacaggaggtttttttcagcttttaacatgctgaaagctgtgtttgtttttattaatccaggcgacggcttcaagccaattctgcaccctgataatattggaatcgatggggagctgattatatggggagttaaaaaggataaccggaatgcctgcttcttttgcgatcattgtcgcattgccgtggtgatcttcgaaaaataaatcaatgccgtgttttttgacggcttccactttgtgatggcctccgacaagctcaatgtgatcgtaatgaatgtcccggtttgcaaaccagtccagcgtaacatcttctaagtggccgcgtcttgccgtaatgtagatcaggcggtgctcttctttcagtccgtccagtgcctgcttggcaaattccgcgagctttgcttctttatatatggctgcttcatgaacgttcatccattcccaaaattcctcgtctgtaatgttcaaaagcttcgtcagatcataatcagtcatatcatccaaggtaatggaaagatgaaatgagcggtttaaataagggacaaatgtatcctgtgccgtaactgtgccgtcaatatctatacctaaccgtaacatgtccacactcctataaattcatcccttcaagtgtaacataaacaattaacaataccagaaaagtttagcaaacatgaatccgtaaaaaacgcggaaactaaaaaagctcctttcataaaagaaaaagggggaattgaaggtggcatacgattacgaaaatcgaaaaggcaacgactactacgtggatcatggatcggaaggaaccgatatcacgcgtgatgtttattcagaagaaacagcggccgaaatctcagagccatatcgtgcttctgaccgggcagcagaccgtgatgataatcgggacggagtaagtgaaggccgggggatagggtatgcagcattggctatttctatcatttccctgtttgtgctccctgttttattaggggcatgcggcattatcgtcggctatatcgccagaagaagaggagcaggcgctttaggcggatgggcgatgggaatcggtattgtttcccttgtgctcggcatcttcattacaccgtttttttaacacaacgcaaaaaaagcttggcggaatatccgtcaagctttttgtgtttcttgttctgcttttgctttttccgcttcaagctttgcgtagtgttcttctgccagcttgtcgatttcttttttcagctcttcgaccattgtttcttcagggactttgcggacgatttggcctttgcggaaaagaagtccttcgccgcgcgcgccggcaatcccgatatcagcttctcttgcttcgcccggtccgttaacggcacatccgagaacggctactttaatcggcgctttgactttagaaatgtattcttccacttcatttgcgatgcggatgagatcaatttcgatccgtccgcatgtcgggcatgaaataagcgtagccgcgtttgaagcaagaccgaatgatttcagcagttctctggctacttttacttcttcaaccgggtcggcgctcagagagatccggagcgtgtttccgattcctttgcttaaaatcgctccgagtccggccgcgctttttaccgttccggcaaacagcgtgcccgattctgtaattccgaggtggagcggataatcaaatgcttttgatgctttttcgtatgcttctatggctagattgacgtcagacgctttcatgctgacgatgatgtcgtgaaagtcaaggtcttccaggattttaatatgatgaagcgcactctcaaccattccgtcagcagtcggatagccgtatttttctaaaatgcgtttttccaaagaacccgcgtttacgccgatccggatcggaattcctttttctttcgctgcttttacgacggcttccactttttcgcggcggccgatgtttcccgggttgattctgattttgtcggccccgccctcaatagcttttaatgcaagcttgtagtcaaaatgaatatcgacaacgagagggatggaaatttgttttttgatgtcggcaatcgcgttagcggcgcgttcgtccggacatgccacccggacaatttggcagccggcttcggctaaacggttgatttccgcaactgttgcttctacgtcgtgtgttttggtcgtcgtcatactctgaatgacgacttcgttatttccgcctattgttaaaggtcccactttgacgggacgcgtttttgtacgatgtgtgatttcactcacttgtcaatcgctccttaattgtagttaccgcttttgcaggctgagccttttacatgtcaggcaacttctatttacatgttatattgtaacagtgtatttgccgaactgacaagaaattaacgtttaattgcggtagacggggaatttataagcggtgcctgcctgaatggcgtttgctcttacattcggattcagcgcttcaaaatcttgtacaatatcatcaggcgctttatgtgcgccgactatcgacatcaccgtatcgccttttttgaccgtaaccgttctgtatgaagtttcctgttgggctggctgtgccgccgctgcgtatgctggaaggtcttgagaagggatcgtgccgattttaagatcgtaaaagataatgaatatcacaaataaactgccgaatacaaaagtaagccgcttcattccaaccgcctcccgcatacatttttacttcattgtatgcttgtcccattttgttcatgacaaaaaagaagaccgccgggggcagtctttgttacacagctgtttttcttggcggtatctcttttaagacgaggaaaaggatgataaagtttacaaaccaattcactaaaaattcactcggcaccgtaataacaagcgcgcgcatgatcgtaaagaatatggtcgaaagtgtaatggaataagccgaaagcttccagagctgctggtaattcaatgtctttctttgcgcatttttcaatatgaggccgatgacggcgagaaatgatacttcaatgaattttccggccgctgtcatgatgaacagcagaacggacaggacggtgacgatcattgttttattttggtttaatgctgatatgatttctttttttgtgatatcagcaggcatcagcgaataattcatttctgtcgcctgtccgtctacagcaagcaccattttatttttcaaaatgccgatcgcattttgtttcgccgctatttgtttagcgccgtaagcatctgtcggatcaaacacgataacgaacccgttcgcttccgtttccttagaggcggacgctttcgtctgcaattctccgtttgaaatgctgaaatcagggaaatctttctttaacacggttttgaaaccgttcattgagtttacggtgccggagcaaaggtaataagcgcttggcagcgtaaaaaggacagacagcaaaaatacataaaggatcgcttttcctatcccctgaaaccgtgtttttgcaatatctgccggagagtatgtacttttcaataaagccgtaaatatgttcaacatcttcacttcctagcctaaactggtatatgttgcttattgtatcgttcacaggggatgaacacaagtgagagtatttaaagcggtgataaggaatcatacataataagataaagcgggaagcggtgatcgcccgcaaaacaaaggagggtgtttttgtcatgagtgttttgtattggctgatgatcattgcggtcttcgtcattgcttttatcgggcttgtatatccggtgattccaagcgttatttttattgtggccggttttcttctctacggatttttgttttccttcagtccttattcttacctgttttggctcattgaggcggtatttgcggccgttttattcgcagctgactatgtgtcaaatttacttggcgttaaaaggtacggaggaagcagggcggcaatctggggaagcacgatcggattattgatcgggcccttcgttattcccgtggcaggcattatattaggcccgtttatcggtgctctctgcgctgaggtgtttgttcatcaaaaggatatcaagtccgcggcaaaagtggggctcggctcgttaatcggctttttaacaagcgtggcggcaaaaggcgtcattcagctctttatgatcgggtatttcttatggacggtgctttagaaaggtttaatttcggccgtgaacggataaagtgtaatatgtctgctggaatcgccggattgtgagctttttcattgattaccacgctttcttttgttacattgagattagaaaagttcgcgttaagcggcatttcagtacatatatttaaaggaggaaaaaattatggcttacaaacttccagaattgccttacgcttatgatgctttagaacctcatatcgataaggaaacgatgacgattcaccatacgaagcaccataacacatacgtgacaaacctcaacaaagcgatcgaaggatctgcgcttgcagagaaatctgtagatgagcttgttgctgatttgaacgcagtgccggaggacatccgcacggcagtccgcaacaatggcggcggacatgcaaaccactctttattctggactcttttatctccgaacggcggaggcgaaccgactggtgagcttgctgaagagatcaaaagcacgttcggaagcttcgatcaatttaaagaaaaattcgccgcagcagctgcaggccgtttcggttcaggctgggcttggctcgttgtaaacaacggcaaacttgaaattacaagcacgccaaaccaagattcaccgctttcagaaggtaaaacacctgttctcggtcttgatgtttgggagcacgcgtactacctgaactaccaaaaccgccgtcctgattacatttcagctttctggaatgttgtgaactgggatgaagttgcccgtctttacagcgaagcaaaataattgagttgaatcatcacaaggtctcccgcgggaggccttgtttttttattgactttgattccttttacatatctcagtttgagtgagacaaactaatgtgtagtaaaggggagtcaatgatgagcaaaataaaaaaaattatcggcgacatcgaaataaataaagggctgctgctgttattgacgattggcggcctttactcattgggcatcgcgctgtcaaatacatttgtcaacgtgtatttgtggaagcagtcgggaaaatttattgatttggccatatacaatttgtcggtcgtaacgatgcagccggttacctttctgctggcgggccggctggctaaaaaaattgacagggtgtttattctaaggttcggcgttatctttttggccgctttttatttaagtgtgctgcttgccggagaaactgcggcttcccgtctcgttttgataggggccgtgctcggagttggatacggcttttactggctggcttttaatgtgctgactttcgaaatcacggaaccggaaacgagagatttttttaacgggtttttaggcattttgtcttcatcggcgggcatgatcggtccgattgtggccggatatgtcatttcaagacttgaaaacaatacgggttatacaatcattttcagcctgtcgctcggcttatttgcccttgccgtggtcatgagcttttttctgaagcggagggagtcgaaaggccggtttatgctgaaaaaagtttttgatgagcgccacacgaatctgaattggcgccggatcaccaacgcgcacttttttcaaggcttgagagaagggatttttgtttttttaatcagcgtatttgtattcattgcgacaaacagtgagctggcgctcggaacattcggtctcgtcaattccgcggtttctttttttgcctattattttgcatcaaggctcatcaaaaaaagagcgcggaaaaaggcgattcttatcggcggattgatcttgtacggcgccctgtttctcatcatttttaaaatgagcttcacgacgctccttttgtacggagtgtttattgcgatcggctatccagttctgctcgtgccgtatgtctcgcttacatatgatgtgataggccgggcgcggcttgccagaaaagccagaattgaatacattgtgctcagggagttatttttaaatgcgggccggatcgtttccatcctttgtttccttgtaatcgttacattgttcaaggaaaaagtgggaataccggcggcgctcgtgctgctcggagccgggcatccgctgatttattactttataaaagacatcaaactggatacggaaacttctgatgaaacagtagaagaagaccgacaaaaacaggcggcggaaccgaattttataaaaggagaaagataaaagggttatctgtagaaaaatatcgaaaaaacctttagaatgaaaaatggcacctgaacagaaggtgtcatttctttctgtaaataagaaaaggtgatgtcatgaggagaaataaaaagaaaatagctgtaaacaaagaaaagaaaaaatcactgccgatccggcttaattttttgtttttggccgcgtttcttattttcacttggattatcgtcgagcttggcatcaagcagatcgttcagggtgatgattataaaaacgccgctaataagcaggaggagtctgatgtcagcacggcggttccgagagggaaaatatacgaccggaacctaaatcccatcgtaacgaataaagcattaaatgcgattacatatacacgttcagcctcaaccacccaggcgcagcgtttaaaaatcgcaaaaaaactgtcgggtatgattaaggtaagcaccaaaaaggtgactgagcgggataaaaaagactattggatgttaaccaggcctgatgaagcgaaaaaactgattacggccgaagaaaagcaaaaagctgaagacaaaaaactgtctgaagatgatttatatcagcttcagctgaaacgcatcacagacaaacagctgaatgagctcacttcaaaagacatgcagatccttgcgatcaaaaggcagatggattcaggctactcactgacgcctcaatacatcaaaaatgaaggggtgtcggcaaaagaaatggccgtcgtcagcgaacatttggatgaactgccgggagttgacgtgacgtctgactgggaacggtcttatccaaataaagggttgttaaaatcagttctcggcagtgtctcgagctccaatgagggactcccttcaaatcttcttgagcattatttgtcactcggctacagcaggaatgacagagtaggaaaaagttatttagagtatcaatatgaaaatctgctgcagggccaaaaagagaaagtgagaaatgtgacagattcctctggaaacgtaacagatacagaaacggtttcaaaaggtaaagctggggatgatttagtgctcactatagataccgaattgcaaaaagacgttgaaaaaattattgagaaaaatttaagggctgcaaaggcaagaccgagtacacagttgcttgacagagcatttgtcgtaatgatggatccccgtaatggagaagtgcttacaatggcgggtaaacagattaaacaagcaggcggcaaatataaaattgatgattatgcactaggaacaatgacttcctcttataacatgggctcagctgtaaaaggggcaacattgttaacaggttatcaaacaggtgctattaaaatcggaaatatatttacggatgaagttttaaatattaaaggctcccctcctaaaaaatcggtaagtgtaatggggccgataaatgatttaactgcacttgagcgttcatctaacgtttatatgttcaaaactgcgattgcaattggtaagggtaaatatatatcaggacattcacttccgcttgattacagcgcatttgataaatttcgttattacttcagtgaattcggtttaggggtaaaaacaggaattgatctgcctaacgaagctacaggatatgtgggaactaaaagacagtcaggtttcttgcttgattttgcgatcggccaatatgacacatacactccgcttcaaatggctcagtatgtatcgaccattgctaatggcggctatcgtatgaagccccaagtcgtgaaagaagtaagaaaaccttcaaaaaaaggtatcggggccgtcgttgaatctgttaatccggaagtgatgaaccgtcttgatatgacggaaagtgaaattaaacgtgttcagcaaggttttaaacttgttatgaatggagctcaagggactgcgagagcaaattttgctaataaaagttatcacccagccggtaaaaccggaacagcacaagctttctatgatggacctataaaatcaagaactggtgcttctacttataacacaactttggtggcttatgctcctgcagatcatcctgaagttgctatttcggtagtggttccatgggcttatgaaaattacaatgacaggtattcaataactaatgacatcggggaagcagctctggacaaatactttgagctgaaaaagaaacaagaagataataatacgaagcagaaaaacgaagataaaattcaggaagacgctgaaaacggcaatacaaatcactaacagaaaaacgctcacaacctgtgagcgtttttttttatacaaaaaaacatccggatttacaaaaccttaacacttgatttatacgcattttacaagaaccctttactctagacctgtaggacaaattacacattaaatgcagggggaattcaggaaatgaaaaaaaacaaatggatgcttatgcttctgatggctgctgttatgattgttgctgcagcatgcggaaatgcaaaggaaagcggcaagacagacagtcaatctgcaagtgaggataaaaaagcatcaggttctttaaccatttctggttcatcagccatgcagccgttagtactggcagcggcggaaaagtttatggaaaaacatccggatgctgatgtgcaggtgcaagcggggggttcaggaacaggtctttcgcaagtgtctgaaggggcagtgcaaatcggcaactcagatgtctttgctgaagaaaaagaaggcattgatgcgaaagccctaaaagaccaccgagtagcggtagtggcgatggcggctgcggtcaaccccggtgcgggcgtaaaggatataaccaaaaaacagctgacagacgtctttacaggaaaaattaaaaactggaaagagcttggcggtaaagatcaaaaaattacactcgtgaaccgtcctgattcatcaggaacacgcgctacgttcgtcaaatacgcgcttgacggagcagatcctgctgagggcatcacagaggattcctccaatacagtcaaaaaaatcattgcggaaacgccgggagctatcggttatctggcattctcttatataaacgatgacaaagtaacgcctttatcgatcggaggcatcaaaccggaagagaaaaacgtcgtcacaggcgagtatccgatttgggcttacgagcactcttatacgaaaggtgaagcgtcaggccttacaaaaatgtttcttgactatatgaacagcgatgaagtacagaaaagtatcgtaaaagatcaaggctacattccgatctctgatatgaaagtcacacgtgacgcaaacggcaagcaaagctgaggggagggcgggctccccgcctcttcttctttataggagtgtaaacaaatgataaatcacagagaaaaagagtctgtaagcgaacgcttaataagctcaaaacaaaacaggcaaatggatgaagtccgcggaagggtgattgtgtctgtgtgtgccgcgattatcattgcggcatcagcggcgatcacaatttttctcggcataaaggggctgcaatctttttttgtaaatggtgtaagcccgattgagttcttaacaagtctgaattggaatccaacccaggcaaaacctgagttcggcgcgctgccttttattttcggatcatttgcggtcacggttctgtccgctctgatcgcagcccccctcggtattgcgggtgccgtgtttatgacggaaattgcgccgacttggggaaaaaaggtgctgcagccggtaattgagctgcttgtcggcattccgtccgtcgtttatggattcataggtcttacagtattggttccgtttatcggctcttttaaatcaagcggaacgggtcacagccttctggcggggacgattgtactttcggtgatgattctgccgactgttacatcgatttccgctgatgcgctagcatcacttccgaaacaccttcgcgacggttcatacgcgcttggtgcgacgaggtggcagacaatcagaaaggtgcttatcccggcggcgtttccgacattgctgaccgctgtcgtgctcgggatggcaagagcgttcggagaagcactagccgtacagatggttatcggaaatacaaagcttctgccggaaagcctgcttgatacggcgggaacattaacgacgattattacgttaaacatgggccataccacatacggcagtattgaaaataatacgttatggtctatggggcttgttcttctcatcatgtcgtttctgtttatattgctcatacgctacttgtcgtctaggaggaaagtgtaatgaaccggaaaataacggataaattggccaccggtgtattcgggttatgcgccgctgtaattgcggcgattttggcaggattgtttttgtacattcttattcacggcgtctctgaaatctccttgcattttcttacgtcaaaatcgagcgccattgcgtcaggcggcggaatacgggatcagctttttaactccttttacattctgtttatcaccatgctgatcacgataccgcttggagtggggggcggcgtctttatggctgaatatgcgccccaaaataaaatcactgattttatcagaacgtgtattgaggtgctgtcttcgcttccgtccattgtcatcgggatgttcggcatgctgatgtttgtaaacctgaccggatggggttacacgattatcgggggcgcgctcgcattaacggtctttaaccttcccgttatggtccgggtgacggaaggcgcgctcactgcagttcctaaggagctgaaagaagcttctctcgctttaggcgtatcgagatggcataccgtcaaaacggtgctgattccgagtgcgattccttcgattttaaccggtgccattctcgcatccggaagagtattcggagaagcggccgcattgttatttacagcgggactgacaacgccgcggctgaactttacggatttgaacccgttttctgaatcatctcctttcaacattttcaggccggctgagacgctggcggttcatatatggagtgtcaatacgcagggaatcatccctgacgccgaagcgattgcaaacggcggctcggcggtgctggtgatttcggtgctcttgtttaacctttgtgcaagatggctcggatctgtcatttataaaaagcttacggcaaattaatcggaaagaggcgaaaacatgattgatcacatcatcagggaacaagcggaacagacaaagcgttcgccggagtcttcaattttggaagtgaagcatttatcaatttattacggtgacaaacaagcggttaaagatgtaaacatggatattgaaaaacatgcggtgacggctctgatcggtccctccggctgcgggaaatcaacatttttgagacagattaacagaatgaacgatgccattccttttgcaagaagcgagggagagatcctttatgaagggctgaatattttgggggaagcgattaatgtcgtgtctctcagacgggagatcggtatggtgtttcaaaaaccgaatccgttcccgaaatccatttacaataacatcacacatgcgctgaagtatgcgggggaacgcaggaaagccgttttggatgatgcggtcgaggaaagcttaacgaaggcggcgctttgggatgaagtcaaagaccggcttcattcatcggctctttcgttatcaggcggccagcagcagcgtctttgtatcgcccgtacgcttgcgatgaaacctgccgtgctacttttagatgaaccggcctcagctctggaccctatttcaaacgccagaatcgagacgcttttgacagaactgaaaaaagattattcgattattatcgttacgcataacatgcagcaggcacttagggtgtctgaccgaacggctttctttttaaacggggaagtggtggaatacgggcagacagaacaaattttcacgagtcctaaagcgcaaaagacagatgactacattaacggaaagttcggatagggggaaggactgtgagccttgtgaaggaagcggtgcacacacagaatttatttgatattcacggcatgaacgtatggtacggagcccatcaggctttaaaggacattacgatcggttttgaggagcggaaggtaactgcgatcatcggtccgtccggctgcgggaaatccacttttattaaaacattaaacttaatgctgcaaatggccccgaatgtcaaagtgacaggcgacatgatctataacggacgcaatctgctgaaagaaaagacggatgcggcagaattaagaaaacagatcggtatggtgtttcaaaaaggcaatccgtttccccagtcaatatttgagaatgtcgtgtacggtccgagaattcacggcgaaaaaaataaaaagaaactgcttgaaatcgccgaggaatctttaaaggcagctgcgctctgggatgaagtgaaagatcgccttcaccagcaggcgctttcactgtcaggcggtcagcagcagcggctgtgcatcgcaagggcgctctccacaaaaccggacgtccttctgatggatgaaccgacgtccgctctcgaccccgtatccacgaggaaaatagaagagctgattttgacattgaaagaaaagtatacaatcgtcattgtgacgcacaacatgcagcaggctgcgagggtctctgatcaaaccgcgtttttctatatgggcgaactggtagaatggggggatacgggcaaaatattttctcagccggatcatcaaaaaacacatgattatatcaccggaaaattcggatgaaaaaaacgggcccggccattgaccgggtccgttttatactccttattaaaaaagcctgccggccgtatccatctgaatggacgatgcctgcaagcttttttagcgggttaatgttttgacgatttttttaaagctcatatctgagtcgactttgaaatggccggcgcggatttctttatggtagcctgcgtcaatgacgtaatcattaaagtccttcgctgaaggaataatcccttctttttcaagaatggatgacacatcagcagtgctcattccgtctttaatcgtcagtttgtatgttacttttttctttttggcgtctgtgttttggtcgttgtttaacgatttttctttagaatcaagcagtttttgatagtcatcccggttgacggagactttttgctgatcgtcgaggtagctgtttacttctttttctgtcaatgctgttttttcggttttaacggcggctgcctggtcatggtcagtcaaatagaagacagcggcgagaacggccgtcgctaaaatcatgcctgctgcaaaagcctgaatgccccgttttgtcatacgagcaccttctcattatctttaataatggtattgacgtcctcgacagacacgtgctccgcttttgcgatggcttccgcagacattccgttgttatattttgaaatgatttgtttggcgattttttggttaatgccgctgcttttggctttgcggatcacgaggttggtttccagcaattcttcttcaagcaccgtcattttctttttcagcttgtaaatttcctgcatggcggaaagctgaagcgtttcaagctcctgttccacgtctttcatcggatctctttgagaatatgagaatgcaataagcgctatactgacgataaacaacgcaataatagcaatttccacgtttcatcaccttctattattaatttgcccttcttttttataccataaaacgccgccattctaaaggaaatagagaaaaaaacggaattttgtcgggaaatcttttttattcggggagcaaacggttatttctctatagatttcgcatcagaaagtccttttttgtcctgtttcgtcatattttcccttcaccaggcgcaagctcattcagaggatcagaagcataaactgatgttttctgcacttaaacaacatttcatgtaaatcactctagcattccgtccattatagtggtattatatataagtctgaataagtaaatgatatttagtttggagggaaaataatgcgcgttaatattactttggcttgcactgaatgtggtgagcgtaactatatttctaaaaagaacaaacgcaacaatccggaccgcgttgaatttaaaaaatattgcccacgtgataaaaaatctacgttacaccgtgaaacaaaataagctgtttaaaacagcggaaaaagctggagctttcaataaagttctggcttttttgtctttcagggaggtttgagaaacgtgaaagcacaaatcagaaccgctatcaaagcaaagctttctgacatgacagaaagtgaatgggaggcaaaatgccgcagcatgcgtgaaacgctgttttctttaaaagaatggaaacaggcccgcgtgatcgccgttaccatctcgacacgcctggaaattccgacacggccgattattgaacaggcctggaaagagaaaaaacaagtctgtatcccaaaatgctttccgcggacgggagcgatggagttccgtacattttctgcgtatgatcagctggaaaccgtatatgcgggcctcagtgaaccgatcgagagccagacggaaaaagccgcccaaaaagacattgaccttgtgattgtgcccggtgtggcttttgaccgggaaggcttcagaatcggatacggcggaggatattatgatcggtacctctccggttataaaggccgtaccgtgtcgcttctctttgactgccagctgacagaccgcattccccgcatgccccacgatattccggtcgataagatcgtgactgaatctgaaaccatcgcttaatcgcataaaaaacttcttgcaccggaataattctcgctgtttgacaaacgataggggcaggagggataagatgaaaaaattgttgatctactcattatgcgccgtatctgttttagccgtttaccaaaaccgctaccgtctgatgaacagcgtgctcagccagccggggatcagacggtcattcattcatttctttttaaaaataccgtttatcagaaacaaattcattcagcaggcattttaaacaaatcccgtttttcagcgggattttttgcataagaaaacctgccggtaaaaaacggcaggttttctcgtattgtcagctttttttcaggaaaccgagcagaattgagatcataggagaaatgtacaggaaaaaggtaaacggcaggtagtcgatgacgggaacccctaatgcgcttgccataaaagcgccgcttactccccagggaatcagcgggttgatcaatgttccgccgtcctcaagcgaccgcgcaaggtgaatccgcttaatgctgagcttgtcatataaaggtttataagattgacccggaattaagatcgacaaatactgctcacctgtcgcaaggtttacgcctatacttgagaagacggtcgccatgacaagacgtcctttcgtatgcacgccttttatcaatccttgaagcagcgccgcgatcaggcccgttttttccatcaggccgccgagcgcaaaggcgatcatgatcagagagactgatcccatcatcgattggagcccgcctctgttgataatgctggccacagcctggtcgccggttttaaacgccgtcccgctttgcagggcggatataaatccttgaatgctgctgtcaggaataaaaacagcagtcagaagccctgcggaaataataccggcggtaagcaccggaatcacggaaacccgtctcacagctaaaatgatcaccaacagaggtgaaagaagcgaccaaggcgtaacgtgcacagcctcttttattccggaaatgaccgcctcaatattttgcgttgaagcggcatttattgaaaccgatgaaccgagaatataaaaaagaacaatcgtgatcagcagtgccggaacggtagtgcccatcatatggcgaatatgcttaaaaatcggaatttcgccgattccggcggcaaaattcgtcgtgtcggacatcggtgacattttatcaccgaaacaagccccgcaaatgactgctcccgccgtccattcgagcggaactcccgccgcgcttgctacccctaacagcgcgacgccgattgtactgacagttgtcagacttgagccgacaagcgtgctgataatcatgcaggaaaataatgcggtcaaaagcagctgactcggctgtataattgacaaagcgtaaacggtgacggtgggaatggcgccgctgtacatccaggcgccgatcagcataccgatcaaagccagtacgataatcggctgcacaccgtttttcaatccgctgacaattcctttttcaagactctcccacgagaaaccgagccacaaacctgccagagacagaataatgacgcaaaagaacagcggcatatgcggctctgtatgaaagaaaaacaggcaggacataatgactgctaacatcaagacaaataaactgatggctgagatgaacgtcagccttttttcttgtttcaaaacaacaccccatcaaactttaatccttttgtgcttttgggcacgaaagtattgtaacagaaaaacgcataaatgagtgtttttttacaattgcgaatatacaatttatgaaaataatacaaggatattttctccaatcgttttttgcttgacgcccggatcagtgatgaaatacgcttatactaagaagaatagaaatggtgaagaagatgaattcattttatgacgtgcagcagctgtttaagtcattcggacatatcgtttatttcggtgacagacaagccgaaattgactttatgaaagatgaattaaaggaaatgtacttgtcaaacgtgattgaaagagaattatggcaaaaagccgccggagttcttcagagagaatcggagcggatcaaaggcagataacacagcaggattttaataagaaaaggagattattatggaagatacatggtttgcggggattgatcttggcggaacaaccatcaagctggcctttatcaacatgtacggtgaaattcagcataaatgggaagttccgaccgataaatcaggaaacacaattacggtcacgatcgccaaagcgcttgaccagaagctggaagaactgaacaagccgaaacggatcgtaaaatggatcggaatgggagcgcccggacccgtggaaatgacgacggggatggtctatgagacgacaaatatggggtggaaaaactatccgctgaaagaccatctcgaggcggaaacgggtattccggccgtcattgaaaacgatgccaatatcgcagcgctcggagaaatgtggaagggtgcaggtgacggggctaaagatgtcattttagtgacgctcggaaccggagtcggcggaggcatcatcgtcaacggagaaatcgttcacggcaaaaacggggccggcggagaaatcggtcatatttgcagtattccggaaggaggagctccgtgcaactgcggaaaatccggctgcatcgaaacgattgcgtccgcaaccggcatcgtccgcatcgcgaaagaaaagcttgcggcggtttccgactcttcgctcttacaagtgcgcgatctgacagcacgtgacgtgttcgaagcggctaaacagcaggataagacagcgcttgaagtcgtcgattatgtcgcaaaacatttaggcctcgtgctcggaaatctggcaagcgccatgaatccgacgaaaatcgtgctcggcggaggcgtctccaaagcgggtgaaatcctgcggtcaaaagtggaagagactttcaaaatcaccgcgttcccgcgttctgcggaagcggccgatatttcgattgcggcacttggaaatgacgccggagtcatcggcggggcgtggattgccaaaaatgaatggctcaaacatcaaaactgctgaagaaagtcagcctgcccatatcgcgggcggctttctttttttatctccccagtcatatagtttttaaaaaagggggatgaacatggcgggaattcgtgtcaaacctgatttgaaacagcatatgaaagatattgcaaaggtgctttcaattgatgaaaaactgttgaaagccgctgataaaacggcggaaaacgatgaattattttgtcccggctttgccgtgagcgggcagtcagagggtccgccgcttgagacgctgagcgggctttcgcgatacatccggcactgtgaaaggattctttccgctgatcaatgggtgaaggaagaaaaggtgtacggctccgaatcggtttatgaagaaattgagaaaataacggatgtctttccgtttgtcacgtgccgtaaaatcggcagttccgtattgggaaagccgctttatgagctgaaaataggtgcggatacggctgaaagaaaagtccatgtaaacgcctcatttcatgccaatgaatggatcaccacctcggtcgcgcttaaatggtgtaaagaatattgcgcggcattatgcgaaaataaaaccgttttcgggcactctgcgcttgatatattcagcctgacatcattgtcattcgttccgctcgtaaatcccgacggtgttgatctcgtactttacggatgtgaagatttatcagaaaaaaatgaatttcttaatcgattaaatgaacaccgcccggatttccgcgaatggaaggcaaatataaacggtgtggatttaaataaacatttcccatccaattgggatattgaacagaggcgcaaaccgaaagccccttcatatcgtgattttccggggacggcgccgctcactgaaccggaggcgcaggcgatgcaccggctgataacggagcagccgcctgacaggctgatcgcgcttcatacgcagggagaagagatttattggggatacgaaggatgtgaaccggagcaatcatcccggatgattcgggagtttgaagcgataagcggaaaccgctatcaaggcgttaaaaccattgacagccatgccggttttagggattggtttatacagcagtatggaaaagagggctataccattgagctcggaaagggaaaaaaccctttgccttttcatcagtttgctgatatttatcaagcgacggaaggtattttgtggaggtcgcttgttttttgagacatctgtgaaatttctcatttgtttacataaacaaatatgggacaatagaaaagaatggagggaaggctggtgagatacttggtttgtgttctgctgtccgcattcgttctgtgtttagcggcctgtgaaccatctcatcagcagcaagacacaggcgtttcggcaaaatcggcagaacagaaaatcgttccgctcagtaaaaaggaagcggagaaaacggaaggatggctggataacagaacgattctgtatacagcacatcatcagctgatgaaatatgatcttttcagcggaaaatccgaacggctctatgaaacaaagggcaatattgtcaatgtaaagatcagccggaaaaaacagctgattctcgtacaggtgacaagcagcggtcagactgagcttgtgcttatgaacaagcaggggaaaagactttatcacaaagcctttaactcttatgagctggagacggcttggaatccgtatgacccgtatcaaatgatgattaccgtttttactgaaacatgggacttcactgcctatacggccgatatgaacaatggcattttaaaaaagagtcccgttcaggccccttttgtccattggacctccactgatgaattccaatatatcaagcaaggaaaaacggaggaagagggtcctttatattcttatgacttgcagacgaaaaaagaaaaaagagtgcttcatcacgtcatctgggccgattcccgcccgggcatgacgattgccgtcagacaaacggatcaatcggacggagacggcgagttccttttccaaaagccggcatccgtgacgcaccgctttcctctccaaaaaaagtatgagagctttgcgccgatggagtatgattacgatcagacacacaagcggttttacatattcaagcctgaaggccgctcttacaatctgatcagctttgacttaggagacgaacgggagcggacggtgctcaaaaacacggaaatggagccgattcagatctctccgaacggggaatacgctttatacggctttacgtatgaccgtctgatttcactgaaaacaggcatgacagaaccaatcataacaaatgaaaaaggagtttgaaccaaatggcaattgcagatgtgacaatcattccgatcggaacaaaaacaccgagcgtcagtgagtacgtagcggatgtgcaaaacattttggagggttacaaagctgccggcaaaatcaaatttcagctcacgccgatgaacactttgattgaaggtgagctgagcgacttattcgcagtcattcaggacattcacgaagccccgttccaaaaagggctgcacagagtggcgacaaatatccgcattgatgacaggcgtgataaagaaacgacactggagagcaaaatcaaaagtgtcagcaaacatttgcagcaataaaaaataggcctgtatccattggatacaggcttttaatgtgcagtcggatagccgctggttacaacggtcattacggtaaaccagccaaacacgcccagcgtggcggcggctaacaaaaatcccaggatatttctctgtctgacagcccgcaggactcctaatacagctaataatgcgacaaggccgaagattacaacaagtaacatcatgctcctcctttgtcattggaacctgaaaatctttccatttcattttaaccgttttcattttgtttgtcgatagcgttttcccggccgcattcattgaatcttccgcagaaaaccttcataataagggcatatacataaagaggtgatgaaagtgaaatggagacgaatgccggccggtccgattcaggcaaacgcgtattttcttgtcagtgaggatcagtcctgtcttatttttgatccgggcggagaagcggacaaaatcaacaattacataaaagaaaacaatctgaagccgctggccatcttactgacgcacgcccattttgaccatatcggcgcgcttgacgaagtaagagacagatgggatgttcccgtatatcttcacaaaaatgaagaaaagtggctggaggactcttccttaaacggatcaggcatattgcggggcatcgccgtaacggcacggcccgccgaacggctgattgaaggcgacggcatattggacatcgggcctttccatttggagacattgtttacgccgggacattcaccgggaagcgtttcttattatgtgaaggacgcggatctggtgatttcaggtgatgtgctctttcagggaggcatcggccgaactgatttacacggcggaagtcaggacgtattgcttgattccattcatcaaaaactgctcacgcttcccggacatacacttgtgttaagcgggcacgggccggaaacggatattcagacagagcaggagcgaaacccgtttatcaatggtttttcactgtaaatgaaaaaagacagaccataatcggtctgtctttttctgtcagtgggttccgccgcccggtgtcataataaaaatagagtaatatgtaaatccggcgaaaaatacggttaagtaagctccgaaaatataaatatacatccgctcagtcagattcaaataagaaagaaatacgaaaaagatcgtctgtccaaaaaacaaaagtgaagcgtctttcatgccccctaaaaaaaacatgactgcaaatatccccgtccaaaatcctaacacccggaacatgcgattcattccttatcccctcccgagagtctatctgaagtttattataatagatcggcactcaaaatgtaaacattttcatgattatatttattgtggaatttatgtctttccctgtgttttatatcttatgccgctctctgaaaaagatccgaaaaatctttttgaaatatgtttaatgaaaaaaagttcagggtacttatgttaacaaagagacggattatccgagggaggaatttttaaaaatgaaagaacttattttttattcatacccgagctgcacatcatgccgaaaaacgaaacattggttaaaagcccacaatgttgactttcaagagcgccatctattcagggagacaccgacaattgatgaattgaagcagatcttatcattaacgactgaaggaattgatgaaatattggcgacgagaagtcaaacatttaaaaatctcaacctgaacattgaagaaatgactgtaaatgaagtgctgaagcttttgactgagaagccgaaactgctgcggcgtccgattctgatcgatcgcaataagctcgttatcggatacaatccgggagaactgatgaagctgacgaagaaaaaaacggtacatcaatctgtatcataagagaaaaacgaagatccgctgatcaaaatttatcagctaatcttcgttttttgcggttgcgggactgggctagctggattcgaaccaacgatcacggagtcaaagtccattgccttaccgcttggctatagcccatcggatgtaattacagtatgtgcgtccggcgccgatttatacatacaaaggaatttgaatggaggagacccgtgaaaaatttgagtgaagcattatctcgaaccttaattgaagaatcaggtgaaatcacacgccagtggctgctcataccaaaatcggggcggcctacagatgatcagaaagcggaaatgcagcaccgtctgttaattgaaatcgttgccggcattttatcggaaaaagacggcggggaagaggagctgacgaaatgggcgcttcagttcgcaagggaccgggccgtccatgaagtaccggtctatgaaagcgtcacgagctttaaagaattccggagattggtctggaaccgcatacagacgtgctgtgaaacaatgtctgagaagcctggggcgaatgcggtattccattggggagagaagctgaacaaagcaattgaccatatgattgaagtatttacagaggaatattataaagtgacggttacacaattaaacgcccaaaaagaaatgattaacgaactaagcgcgccgattatgccgattgccgacggtattggaattttgccgctcgtcggcgaaattgacacctaccgggcaaaaatgattttggaatcggtgcttgaccaatgttcttcactccgtctttcttatttatttttagatatatcaggtgtgccgattgtggatacgatggtcgcttatcagatttttaaagtgattgacagcacaaaacttcttggcatagaaacgacaatctcaggcatcaggccggaaatcgcgcagaccgtcgtgaagctcggcatcgatttttctcaggtgaaaacggagcagagtctggcgaaagcgctggcaaaaaacggatttatcgtaaaagaatcattaagatgataaaaagctgaatggccgggagggatgtctccctcagctattcagctttttcagcttcaatcgtaatgatatgatggctgtcgatttcttttaccgtaaatgtgtagccttcaaaatcaatggtgctcccgggcttcgcgtcaatatgctgagtaagaaaccagcccccgagtgtatcgacttgatcagccgtaatctctgttccgagtacatcattgacgtcactgatcagcaatttggcgttcaggagatagcggttcttcccaagcttttgaacagaaggtgtttcgtccgtatcaaattcgtcgcggatttcgccgacaatctcttcaatgatatcttccgccgttactaatcccgcggttccgccgtactcatcaatgagaatggccatatgggcgtgttcccgctgcattttaacgaataattgataaatcggaatcgtctcaatcacatggatcgccggctggatgtaagggctgagttcgtgttttgtaaacgccgctccttctgacaggaatctgaataaaacttcttttatattgatgatgccgactacatgatctttatctccttttactacgggataccgggtatatttatttgttttgataatgtcccggagcatatgtcccgatccgctgtctaacggcagactcaccatttcattccggggcaccataatttctttggcagtgcgcttatcaaatgtaaaaatgttatttacgtaatgcagctcgctttttttaatcatgccgcttcgatagctttcggcaaggagcacccgcaattcctcttccgtataagccatttcatgttcggaagcaggcttcaagccgaacatggctgtaatcaggcgggcggaatgattgagcagccagatgaacggaaacattaacttataaaacaaaatcatcggtctggcagacaaaagtgtaatccgctcggctttttggatagcaaaacttttcggggcgagttcgccgataacgacattcacatatgtaaccagcagaaaagcgatgatcaatgacaggacttgggcaaccgcttcgtgaactccggtctttaaaaataacggctgaagcatcgctttgactgtcggttcacccagccagccgattcccaaagcggtgacggtgatgcccaattggcatgccgataaatattcatcgaggtgtgtaatgacatgcttggctgcttttgctccttttacatcttcctcaatgagctgattaatgcgggagcgccttgctttaacgattgaaaactctatggcgacaaaacacgccgttaataaaataaatagtacgatggcagacagtttgatgatatacaatgtaacgccttccgcgaaggaaggcttgcacctcccttttttcggaataataccactgtagaaagctgctcaaacatcgaacctggtttagcctgcttcatttacggtaataaaacaagaaagcgatactggaggatgacaagagatgaaggtacattcgggagcggactggctgtggtaccagctcggtccgcatgaaaaaacagaagcgaaaaaaatgatccatcacaatcactggccgcaatgcgaaaagtggtttgaacatgaaaatcatataaactttctgcgctcagatacaaatgatcagaataatgaagcggttttcggttctttaatctatcatcaaggattagatgatgaaaaaaaccataccgtatttcacttttatattacgagagacttcttttttacaattaattttgatttttcgctgctgcgcggtgtaaaagaaaagcatgccacacagcagattcaaacctgtgaaaatccgattgaaggcttttttgttctgctgggagagctgatgaattcctatctgatcggactggatgaatttgaagtcaagcagcggacgctgaaatggcagattcatgatgacaacagcaaaggaatcttggaaaatgtgcataaactgcgccatgagctgttcatttggaaaggccttacactgggggctcaaaaagtggaaatggctttaaaagaagcttttctcccgaaaaatgacaggcagaaagattacctcagagctcaccaaaagatggaaagaggaattacatatatcaatgagtttgatcaggaactgagcaatctgctgcacgccgaggaagtcattacctcccaaagaggaaatgaaattgtgaaagccttgacgatctttacaactctctttacaccgatgacggcgcttggagctctctgggggatgaactttgataacatgccggagcttcattggaaatatgcgtatatttgttccatcgtgctcattattgtatcaaccctgctgatttatatttatctgcggcagaaaggctggacaggggacattttgagggagcatcaaaaaaaatatttgcggaaagaaaagaaacgctaagaagagcaggcatacgcctgctttttttgatggctgaaaatggccgaatggttccggatttcattcggtaaatcaatgtcaggtggcttattttttatttttttacgttttacacactgtaaaacgcataatctctcctttgccggcttttgtgtatctgatttacaatacgtgcggaaggagggaagtcttgtgaaaaatattgaaacatatagcaggaacatcataaacgaggcctatacggcaagggcttcagatatacacattgtgccgagagaaaaggatgctttcattcattttcgcatcggctatgctcttgtgaaaaaaagagtcttaaaaaaagaggaatgcgtaaggcttatttctcattttaagtttttatcggccatggatataggagaaagacgtaagccgcaaaacgggtcattgtctctgccgcttccgacggaaaccgttcatttgagaatgtcaaccttgccgacaatgaatgatgaaagtcttgtcatcaggcttttgcctaagcggcagattccccctctggataaactgtccttatttcggggggcgggcgccgcactattgtcctttctgaagcattcgcacggcctgcttctgtttaccggccccaccggatctggaaaaacgaccactctttactcgcttgtcaactatgcaaaaaggcatttcaaccggcggattgtcacgcttgaagaccccgtagaaacaagagatgaggatgtgctgcaagttcaggtgaatgaaaaagccggagtcacatattccgccggtttaaaagcgattttaagacatgatcccgatatgatcattttaggggaaatcagagatgccgagacggctgaaatcgcagtccgcgcggccatgacgggacacctcgttctttcaagcctgcatacaagagatgctaagggcgccatatacaggctgctggagttcggcgtgaacatgacagaaattgaacaaaccgtcattgctattgccgctcagcgtctggttgatttaacatgtccgttctgcaaagaggaaaactgttccgtgtactgccggatgtacaggcagacacgccgtgcgggcatttatgaactgctctacgggaaaaacctcacccaatgctttcaggaagcaaagggagagcacgccaattttcaatatcagacgctccgcaggctgatcagaaaaggaatcgcgctcggctatgtcacgaccgacaattacgatcggtgggtgtatcatgaagcggattaaacgaacatggccgttgaaggatcaagcggcttttttgaaaaggctcggtggaatgacggaaaaaggatacagcctgattgaagggctcagactgctgcaactccagctgcataaacgtcagcttgcagagctgaaggaaggaatccgccggctgagagaaggtgatgcgttttaccaagtgcttgaggcactgtcttttcataaagaagccgtctctatctgctatttcgcggagaaacacggggaattgccgggggcgatgaaacaaagcggcgaattattacagagaaagctcatgcagacgaatcaaatcaaaaaaatgctccggtatccgatgtttttaattttttccgtctgtgtcatgttttatatcctgcaaagtttaattattccgcagttttctgggatttatcaatcaatgaatatgaatacgtccggtgcgactgctttcatctttgcattttttcggcattttcatgaagcctgcgcactggcgctttccgccgctttctgcttgtttttgtacgtttggttcttatgtaagaaaaaatccccgcaagataaaatgctgattgttgtgaaaataccactattaggaaaagcggccgttctttttaacagctactttttctctttacagctcagcagtcttctgaaatccggcctttcgatctatgacagcttaacagcttttaaagagcaatcttttctgcctttttatcgtgaagaagcagagatgctcattacacgtctgaaagccggagaaaccatagaatccgctctttccgggcatccgtgttatgaaaaagaccttgcggctgcagtcagccacggacaggcaaacggcctgcttcaccgcgaactttatacgtacagccagtttatgatggagcgtcttgaacaaaacgcggcgaagtataccggcattctccagcctgtcatttacggtgttgtggccggtatgattttaattgtctacatgtcaatgctgatgccgatgtaccagatgatgaaccaaatgtaagggagtgcttcgtctgaaaaatcaagatggatttactttaattgaaatgctgattgttttatttatcgtttccattctgcttttaatcaccattcctaacgttacaaaacataatcaaagcattcagcataaaggctgtgaaggactgcagattatggtgaaagcccaagtgacggcgtacgaaatcgaccatgaaggtaaaatgccggatatgaacgatttacaatcagaggggtatatcaaaaagaatacagtctgcccgaatggtaaacagatcttaattagtggcggagaagttacagttgaacaataacaggcggacagaaaatgggtttacccttcttgaaagcctgattgtgttaagtctggcgtccgtcctgctgacggttttgttcacgacggttccgccggcctacacccaccttgccgtgcggcaaaaaacagaacagctccaaaaagatattcagcttgctcaggaaacggctatcgcagaacataaaagaacaaaaatcacttttcttccaaaagagcataaatacaaactgcagtcaggcggaaggattgtcgagcgttcctttgattcgcttcacattacacttgtgactttaccggagagccttgaatttaacgaaaaaggccatccgaattcgggaggaaagatccaattgaagagcgccgggttcacctatgagatcacagtttacttagggagcggaaatgtccatgctaaacggaaataaggggttctctactattgaaacactatcagcaatggccatttggctgttccttatgacgtctatcattccggtctggacgggcatgctgacagatggtctgaaaatagaagatcgccaggaagcgtaccagcttcttcagaaacatatcagcacttatatgatgaccggaaaaaagccgccgtctcccggtgtgaagtggaaggaggatggtgagtattacaaagtgtgtacggctgaccgcagcgaaaaagaaatgtgcctcagcattctcaaaacagactggctttacgcttcttaatgttttgttctccttggcagtctgtcttttcctatcaggcaccttgggcccgattttacatctgtttttatcaaaccggaccgataacggcggattagacagccgggagcatcaaattgccgttcagcagatcatgaacgaatgtaaacaggctgaggctgtggagccggcggacggcggacgggcgttagcatgccggaaaaccggaggcgaagaagtgcgttttgaaatttatcataagatgataaggaaaagagtaaacggaaaaggccacgtgccgatcctgcaaaacgcggcatcattaacggctgatgtgaaaaacggcctgctcttattagagatctcaagcgttgcaggtcaaaagaatcaggcggtcattccggtttacagcttttttaaaggtgattaaatgtacaaatctgacggttttatatatcccgcggttctgtttgtttctgccgcagttttacttgtcatcagctatacttcatctgatttcatcacccgaaaaacatttgcaaaagaggccggggaatactggatcggagagaacttgctccaaaacggcgcgctgctgtcaagccgccatatgacacagggacaaaaggtccaaactggtacacagcgttttccgtatggcaccgtttcttttcacatcacggggagtgatcgccgggaaacggttcaggttacaattcaggcggaaaccacgacaggaacgagacgggaggctcaccttttgttcgatcagaagaagaaacagctgattcaatggacggaagtataaaaaagaggcggcgggacaacacttcatagtaaagacagcactatgaggtgagagccgtgaaaacaaatgattatgtaaaatatatgactgagcaattcgttaaatatttcgatacgccgaaacaggaacggagagagcgaaaagaagtgcggaaagaaaagaaagtgccggcttctcagcactggttcggaatattgccgtatagttttaagctgtggatgcagcggaaaaaataaagtgaatcacgcgaaaggtcctcctgatacaggagggccttattggtattcctcaatgacggcaattttatttaccttttggctgtagggattaaaagaaatcgtaacaaacacgccaaattcttttgcgccatcccgcaatgtcaagtggtattgcttgactgcttcgtccgttcttttccgatcccacaccttttgaataaataacgtttgggagagcggatatctttttttagcttccttttctgctaacttttcccatcttgatttatggtgaacagcataataaggcaccgtttccccctgagctgttcctgaaaccccgaaaacaagaagagaaaggcaaatcagactttgtttgatcatcattcttcgtcctttcgctgtatatactttccattttgttctaggcacctcgttattttctcacgttttattagaaaaaattccaaaaaggtgtgtaatttgaagcaaaacgctgtttttaaaagataccattctcaaaaacgaacaatttgaccgattttgacatttttcaagacgataatccttgattatactttgttcatacagttctttaaagagaacggttgtcatatttattaacagttttacagggggtaaggcatgttccgattgttgcgaatggaaaaaaagggcaaggtgagatggcggatgatgctattgttacggctttcgttcattttttgcctgtccgtgacgatatgtgctcagttcacaggtgatacaagttcctccttcaatgatgtgaaaagcttcagtctccaggttcaaacgtgcggagattttcaatatacggatgacgattgccgttatgacgaacgctgggatcaaagtgatttacatataacaaatcaaactgatacgtcaggcaccgtgtgtgcgccgcttcagctctatgccgagctggagaataagggaaaagagcggactgtttctgactggaaatggaagctccataaaatcgcttctcagcagcagcctttacgaaacggcaatgttgtggataaagggcttattactgataaaaaaagcaaaacgatttataaaattgagtcaaagcggtctttgcagccgggcatatacgcattcaaggtttacaagcctgaagggtatccggcggacgaagaaaaatttgagtggtcaaaaccgatgaaactcgtcaaatgccgggaacaggcgacagtttccgatctaaagaaaacagagaaagagccggctgagccggtaaaagaaagcggggaagaacatgaaaaaaacgctgaaactgatcagtaatattttgtatgccgtcatcttcagcttgattattgtgctgacgttaacggtgatttcgacccgggcttccgggggtgagccggccatcttcggctatacgctgaaatccgtgctgtcgggttcaatggacccggaatttaagacgggttcgctcatagcggtaaagaaaatttctgacgtgaatgacttagaaaaaggggatgtgatcacctttacccaagatgacggaacagccgtcacacacagaataatcgggatcacaaaaaaggacgggaacctgctgtttgagacaaaaggggaccataatgccgccccggatgccgcacccgttcaagctgaaaaagtggcggcccagtatacaggatatcagcttccgtatgccggatatgtcatacatttggccagccagccgatcggaacggcgattctgttaatcgttcccggcgtcatgcttttgatttactcaataacagtcattgtcagcgccctccgcgatattgagcggaaaacgaaagcgctggaagaacatgcgaaaaagggaaccatctccacatgaatacggttgcaacctggcgacaggatttgataacaaaaataaaaagtaaggggagagtacaaacatgggtatgaaaaagaaattaagcttgggcgttgcctcagccgcactcggtttagcattagtaggaggaggcacatgggccgcatttaatgatgtgaagtcgacagacgctacatttgcgtcaggaacacttgatttatcggctaaagaacaatcagccaatgtcaatttgtcaaacttaaaaccaggcgataaattgacgaaagattttgaattcagaaacaatggttcacttgctattaaagaagtgctgatggctttgaattttactgactttaaaggagcaaagaaaggaaatgaatctgcggaggatttcctcagtcagtttgaaattacggttctgacagtcggtaaagaagggggcaacggctatcctaaaaatatcattttgaaggcggccagcctgaaagacttatacttaatgtcaacaaaacaggataaagcagctgccgaagcgatcagcaagcacattgatccgaaattcctgagtgagagcggaaaagtcaatgtagcaaccattaacggcaaaacagctcctgagtacgacggagttccgaaaacgcctgctgattatgaccaggtgagaatggaaatccaatttaaaaatgacaccgcaaaaactgcggacggattaagtgtgcaaaacaagttccaaggcaatgcgatttctcttcaattctcttttgaagcaacgcaatggaacggcttgaccattacgaaagatcatacggataaagacggttacgtcaaggaaaatgaaaaggctcacagtgaggataaaaactaatccgaaagtcggacagttaaaagaggagttgtgcacatatggcggcactactcctctttttgcgcttttctccatttttgataatctaaaaattcacgaaattgtttttttgataccccggatgtcatcgcatcgcgaactaatttctcccattcactatctaattgaccatcgtattcggtttcatgtttttcatcaagtaaagtatgaaccgagacgtccagaacagcggagactttttcgagaaattgaatggaggggttcgtctgtaaatttcgttctattgagcttaaataagacttcgctaccccagctttttcagctagttctgatagtgagtagcctttttcttttcggtattgtttaatacgctggccaatcaatgtcatcaccttccttgtgatattatagcacattcagaaaggatttacggtatgacttctggctgcctggatatgttgagaagactttttatgcgaaagcaggtatttgcgtatttcttctaggctgatatttgctttttgggcttctaatatcagctcaacccattccttatctaattgcgaaaattccatttttgcatttttcatgcattttctcctcctaaaatacttgtttatgtatttcagccaatccgcccatgaccttatctttacatgtctggaagtgattcatcgcatgcgaaacgccagaaattttttctatatacttttattataatatagaatttccagaaaaaacgggaaaggtgtcgaatggataacgcttatccagaaaaattactttgcaggaaaaataaaccgccattttcaatctgaatgtgaatgttcggctgatataaggctttcagcgcttgtttttccaaatggtattcctcaggtttttcctctgtctgctcataaaactgatcgagcagcctgaggtcctttttccatctggcgatcgcgctgtcagcccagtctgacggctctttggcggcagcgtcttttaagtaatgctccattcttttaattccgctttccggcttaatcatcggcgatatggtaaagcaatagtctgatatttgcgaggtcagcggaagcggtgcaagcttctgctgaaacccctctataattgttccagaaacaagatgcaggcctaaagacaaaagtctgtcttttttcatgtcggattggtatgaaatcactacatttaatccaagccagggctgaagcggcactctggctccggctgatacaattttctcatatattcttgtaaatctcccattttgtttaactgcttgaaagatttgaaagaggcgcggggctccaaagtaaataaattcgccgtccatatcctccggagccgtttctttatcagtgatgaacgtgatcttcatcgggttcggttcgccgcccgttttttcacgccaatgccaataaaacgggcggttcataatttgtttgtccatctcgaccgtcaactgaaccgtcataaaacccggcccgtgttctgtaatcggacagtggttcgcttcaaaaaagcgcagtaaaaattcgtgaacctcctgctgtctcatgtcgcgcttcctccttttagattaagatcctttttttctggcgggcttttccgtaccgtacgacagaaaagaggtgagattgtccattttgattctcatttcttcctctgtcagcgaatggcataaaatatcatgcaaatggtcttcaaaattgctcactttgatttttgttaagatgtcatctaattctccgacgacattttcaaataaatgaattttgtcatacagaagttttaagatatgctcttccaccgtatgttttgtcgccatattgtagatatggacatctctttcctgaccgagtctgtgaatccttccgattctttgttcaagccgcatcgggttccacgggaggtcataattgataatatggttgcagaattgcaggttgatcccttcgcctccggcttctgtagcgatcagcacctgcactttgccgcggaagagatccttcatccagtctttttttccgcgtttaaatccgcctctgaacggaacggagcttatgccgttctgctgaaggaaccattgcaggtaaatctgtgtcgccctgtattcagtaaaaataatgactttgtcattaatcttttggatcaagtcaacaacttgaatcgcttttgagttttgcgtgacttgattgatgcggtccattaaattagcgatcgtctgatcatcgaatgcgggcgcttgtttgtctttttggtcaagcatttttttgagcgtcatatacacggcttccctgcttgaacagcattctctttgcagcgtcataatggaaaatgcgctggcgggcttttccgtgccgtttttcagtgcggcgatgtcatcgtaaagcgcctgttccgtcggtgaaaaggtgatcggcactgtttccacgtggcgcttcgtccatgtaaggccggtgtcgctccgcgtgttgcggatcatcactttattgacgagctctttcaaatgctcatgagcgtcaatcccgtccttctgattgaaggtttcttgaaatccgctttcgtttcctaaatggccgggctttaacagtgacactaaattgaagatttcttcgatccggttttgaatcggcgtcgccgtcagaagcaggcagtatttcttcacaagacttctcgcaaattcataatttttcgttttgctgtttttgagcttgtgcgcctcgtcaataatgacgagatcatacggaatagaaagcacaatgtctttgtgaggcgagcgtttggccgtatcaatagaagaaacgacgatatcgcactgttcccacacatagcttttcttctgttcaacagcgggtattaaaaacttctcctgaagctctttcacccactgggaaacgagtgatgccggcacaagaatcaggatttttttggccagcccgcgaatcatatattcttttaaaatcaggcccgcttccaccgtttttccgagccccacttcatcagccaaaatcgccttgccgttcattttttcaacgactttctgcgcgacctcaagctgatgtggaagcggagtgaaatcgggcaggtataaaggagccctcaacccttcaaattcaggaatggcaagggtctgctggacttcagccgacagtttgtacatctcccaatttgaccagggaccgtccgttttcagccgctcagaaaactctcccggccagtttgcatcaaatatgatctctgctgtcatatgtaacaaaaccgcctttcttttaaaaaactgatttatcataatttttgttgccggacgtaaatgagggtggtaggatataagtaatgatttcactaaaagatattgctttagtatgtccataaaattggtaaatatgagcgaatgacagcaaggggagagactcggacgaaagatgggcgtccgggcgccgaaggagcaaactgcggagtgaatctctcaggcaaaagaactcttgctcgacgcaactctggagagtgtctgcacttagaagaagcaggccaccaaaggggacgtctttatgatatgttcataaagtaaactttcaggtgccgggacagagaaaccttcattttcatgaggtgtttctctgtccttttttatatgtttttacaatgcgccaatgactgaagggggaagatgatgctgaaacgaacaccgctttatgacgtgtataaagaatacggcggaaaaacgattgattttggaggatgggagctgccggttcaattttcttctattaaagaggagcatgaagccgtccgcacaaaagcgggcctgtttgatgtgtctcatatgggggaagtcgaagtatccggtaaagacgccctgttttttctgcaaaaaatgatgacaaatgacgttgccgatttaaagccgggaaacgcgctttataccgccatgtgttatcctgacggcggtacggtcgatgacttgctgatctatcagaaaagcgagagctgctatctgctcgtgattaacgcgtctaatattgaaaaagacatcgcttggctgacggaacatgcggaaggcgatgtcacgctgacgaatcagtctgacgggatttcactgcttgccgttcaggggccgaatgctcagtcggttcttacgaagctgactgaatgtgatttgtcctccttaaagccgtttacgtttattgatggggcggacgttgccggacgacaagtcctgctttcaagaacaggctataccggtgaagacgggtttgagttatattgccgcaatgaagatgcggttcatctatttaaggagatacttgcagcgggagagcatgaaggcctcgttccgtgcggcctcggcgcccgtgatacgctgagatttgaagcgaagcttgctttatacggtcaggaattgacgaaagatattacaccgattgaagccggaatcggatttgccgtgaaacacaagaaagattcggattttttcgggaagtctgtattgcgcgaacagaaagaaaaaggagccccgcgaaagctggtcggacttgagatgattgaaaaagggattccgagacacgggtacgccgtgaaaaaagacggtgttccgatcggtgaagtcacgacaggcacgcaatctccgactttaaagaaaaatatcggccttgccttaatcaaaacggaattcagtgaagtcggaacggaagtagaagtggaaatccgtaaaaaaacggttaaagcgaagattgtccgcacaccgttttataaacgtccaaaacagagctgaaaaaaggagagtcatatgaagcatcgatatttgcccgcgacagaacaggataaaaaagaaatgctgaaagccatcggcgcagaaacaattgatgaactgtttgccgatattccggaagatgtgaggtttcaaaaagactaccaaattaaaaaagcaaagtcagaaactgagctgacgagagagctgacaaagcttgcggcgaaaaataaagacgctgttacatatgcatcttttctgggtgcaggagtgtacgatcactaccagccggttatcgtcgatcatgtgatatcccgatcagagttttacacggcatatacgccttatcagcctgaaatctcacaaggagagctgcaggcgatttttgaatttcaaacgatgatctgtgaattaacgggaatggatatcgcaaactcctctatgtacgacgggggaacggcgctggcggaagcggcgatgcttgcatcgggacatacgaaaaagaaaaaaatcgtcatttccgcagccgtacatccggaatcgcgggatgttttgaaaacatacgcaaagggccaatatattgaggttgtagaggtgcccgcgaaaaacggcgtcacagatcttgaagcattggaacatgccgtttgtgatgaaacggccgccgtcatcgtccagtatccgaacttcttcggacaaatcgagccgttaaaggacattgagccgctcgcacataaaggaaacagccagctgattgtttcttcaaacccgctcgcgctcggtattttgacaccgcccggggcatacggagctgatatcgttgtcggggacgcgcagcctttcggcatacctgcggcgttcggcggcccgcactgcggctattttgcagtaacgaaaaaactgatgagaaaggtgccgggccggcttgtcggccaaacggaagatgaaaacgggcgaagaggttttgttctcacccttcaggcgcgtgagcagcatatcagaagagacaaagccacgtctaacatttgttcaaatcaggcgctgaatgctttagcagcttcagtcgcgatgacggcgctcggaaaaaacggcgtcaaagacatggcccgccaaaatatattgaaagctgattacgcgagacgccaagcggaaaaagccggcttgcacgtagcatttgacggcccgatatttaatgaatttgccgtcaggctgaatcttcccgtcaaggaagcaaaccggcggctcctgcaagacggcataatcggcggatatgacttaggccttgcgtatccggaactgaatcagcatatgctcattgccgtcacagagctgagaacaaaagaagagatcgattcgcttattgcgggattgggggatcaacatgaataatcaagatcaggcgcttatttttgaaatgtcccgcgaagggcgtatcggttacagccttccggagcttgatgtgccggaaacagagcttgaaagccttcttcccggtgactatatccgcgatgaagacgcaaagctgccggaagtatcagagctcgatattatgcggcattataccgctctttctaagaggaaccacggagttgattcaggcttttatccgctcggctcctgtacgatgaaatacaatccgaaattaaatgaaaaaattgcccggatcgcaggtttttccgctattcatccgcttcaggacgaggacacggttcagggggcgcttgagcttttatacgatttaagcggacacttggaggagattacgggcatggacgaggtgacgctgcagcctgcggcgggcgctcacggcgaatggaccggcctgatgatgatccgcgcctatcacgaagcacggggagacttcggacggacgaaggtgattgtccctgattcagcccacggtacgaatccggcatccgccacggtcgccggttttgaaacgattaccgttaagtcaaatgagcacgggctggttgacattgaagatttgaaaagagcggtaaacgaagaaacagcggcgctgatgctgacgaatccgaacacccttggattatttgaggaaaacattacggaaatggctgaaatcgtccatcaggccggcggaaagctttattatgacggagcgaatttaaatgccgttttaagtaaagcaagaccgggagatatgggatttgacgtcgttcaccttaatctgcataaaacatttaccgggccgcacggcgggggaggaccgggctcaggtccggtcggagtgaaaaaagaattcattccgtatctgccgaaacccgttctcacgaaaaaagagggccgtttgacttttgactatgaccggccgcagtcgatcgggcgcgtaaaaccttattacggcaacttcggcattaatgtcagagcctacacgtatatccggtccatggggcctgacggcttaaaagctgtgaccgaaaacgcggttttaaatgcaaattatatgatgagaagactcgcgccttattatgatctcccgtatgaccgtcattgcaagcatgaatttgtgttatcgggaagaaggcagaaaaagctcggcgtaagaacgcttgatattgccaaacggcttttggatttcggctatcatccgccgactgtgtattttcctctcaatgttgaagaaagcatcatgatcgaaccgacggaaacggaatcgaaggaaacgcttgatgcgtttatagatgccatgattcaaattgcgcgggaagcggaggaatcgcctgaaatcgttcaggaggcgccgcatacaacagttgtcaaaagaatggatgaaaccaaggcggcaagaaagccggttttaaaatacgaacgtacacctgacgtcagccgctgacacggtataaaaaaagagcttccgtataaaacggacagctcttttttcatgattagttttttgctttaatttttccgccccattttttaaatccgcctttcaggttgtaaatatctttgcagccgtgtttgcggagcgtctgtgccgcgcgtccgctgcggacattgttttggcagtacagataaacgggtttatcaggacggatttcacttttgcgctgtttcagctgtgacagcggaatgttgcgcgcgccgagaatatggccgccttcaaattcattcggctcacggacgtcaatcagctgcgcttttctgtagcccgcgcggaattcctcttccgtaagtgttttcattaaacgctgctggtaaaaatacgaaacgatcatataaacgataaacgccgcaacaataattaaagcaatcatattagacaatgcaattctactcctttagcttataaaatcaaaaccctgcttcctgaaaacaaggcttaccggacgttttgggacaaatactattatagtaaagcatgaagcgattgtcatccttaatgaaacgaaatatttttcattttcaaggcagtttgttaaactgattttattaaaacgataaagaagggttcagtgtatggaaaaagaaacatggcggtttattgactcagggaatgaaagcccggcatttaacatggcgctggatgaagcgcttttatattggcacagccaaaagaaaattcctccggtgatccgattttacggctggaatccggcaactttgtctgtcgggtattttcaaaatattaagaaggaaattaactttgacgcagtacataaacacggcctcgggtttgtcagaagaccgacaggcggacggggtgttctgcatgataaagaattgacatacagcgtaatcgtttcagaggatcacccggaaatgccggccacggtgacagaggcgtaccgggtgatttcagaaggtattctgcagggattcagaaaccttggacttgatgcctgctttgcgattccgcgaacggagaaagaaaaagaaagcttgaaaaatccgcgctcgtccgtctgctttgatgcgccttcgtggtatgaactggtcgttgaaggacggaaagttgccggaagcgcacagacacgccaaaaaggcgtcattcttcagcacggttccatcctgctcgacattgatgaggataaactgtttgatctgtttttatatccgagcgacagagtccgtgagcgcatgcagcggaatttcaaaaacaaagcggtagccatcaacgccttagcgccgaaacgggtaacgatggatgaggccagaatcgcttttaaagccggttttgaggaagggctgaacatacatcttgagccctacacactcacgtctgaagagcttgcatttgtcaatgagctggctgagacgaaatacgcgtccgatgaatggaattataagcgctgataaggcttgacagaccggaagcatccttgttttttcatgaccgttagtgtaaacttgtaatggtttataaagttaaggtgctttttgggagggttacttatgacaacaccaagtatggaagattatattgaacagatttatatgctgatagaagaaaaaggatatgcacgggtttctgatatcgcggaagctttggcagtccacccctcctctgtaacgaaaatggttcaaaaactagataaagacgagtatttgatttatgaaaaatatcgcgggctcgtattgacgtcaaaaggcaaaaagatcggcaaacggctcgtatacagacacgaattgcttgagcagtttttaagaatcattggtgttgatgaagagaagatttacaatgatgttgaaggaatcgaacatcatctgagctggaacagcattgaccgcatcggcgacctcgttcagtattttgaagatgacgaaagccggaaaaaagaattgaaatccgtacagaaaaaaaccgaaaatcccggtgaataaagggcagcccgaaatggggcgccctttttttaatgtcttcattctttggtctatttcgcccagccgtttcttaaaataataatacaccttgagatggaagggagagggcgcgctatgcagattgacggcgtattttcgggaggggggataaaaggggtggcgcttgccggcgcttatgaagcgctggaagaaaagggctttcgctttgaaaggctcgccggaacaagcgccggcgcaattattgccgcatttatcgctgcgggctatacgagcagagaggttcattccatcatagatgaggtggacggaaggcaattgcttgatcagagatactcattcctcccgctgaaaatcctgcggtgggtgtcgatatattggcgcctcggactatacagaggcgatatgctggaaaaatggattgcggataaattaaaagcgaagggcatcatcgcgttcggcgatttgaaaaaaggctcgctccgtctcatcgcttcagatctgacgaacggaacgatgatcgtgcttcctgacgatcttccccgctacggattaaatccggagatgttcccggttgccagagccgtcagaatgagctgcagcattccttatttttttgaaccgataaaactgaagacagaaaaaggcacctcaacggtcgttgacggcggcgtgttaagcaatttcccgatttggctgtattcaaaagaacgcaaacggccggtcgtcggaatttcgctttctccaaacgaaaaagagcgcccgaaaaaatcaatccgcaacgcttttgagctgttcggggctttgtttgaaacgatgaaagacgctcatgatgccaggcatatcgcgacaaagtacgaacagaatattatttttattccggtggaacatgtgatggcgacggagtttcatctcacaccgcaaaaaaaactagctctcattgagctaggaaaaagcagaacagagcaatttttgaagcaatggagctattaaaaaagcgctctgtttttctttttattctttttgccttctatgacggtaagctgggtctggctttttttcttaagaatcatcggcttcggtctgctgctgctcggcacgctccgcaaatggctgacccggcctctgtgtccggcgcggtgcttcgctttttgctccttcattcggagccgcgattgtctggccgcttttctgaaagcggttccgtcacggccggtgcggcggttcaggaccgtcctcacgataaaataaataatgatgcctgcgataataacggtgatcgctcttgaaatcatctgcccggggttggttaccgccgcataaatgaaaccgaatgcgccaagcgctatcaatacagcaaaaaaaggttgtacacgatgattcataactgcccacctccaaaataataacggtaacggttcagattacgttgtgagacggtttttcgctctgttctgaaatgtcttccagtctgagaagctcgttaaagctttctatggcaacctcgacctggtcatccgccggttcctttgtcgttaaaagctgcagccacaggccgggataaccgagcactttcaaaacggggatattccgcactctgttcgtcagctggagcacttcaaaggagatgccgagaacgaccggtataagcgcaatcctgtctaaaatccgcacccaaagcggatctgtcggaacgagtaaatagatgaacatgccgacaatgatcgtaaataaaataaagcttgaaccgcaacggtaatgaagccgtgactgcttctgaacattttctattgtaattggcaaattctgttcataacagtttatgaccttatgttcggctccatgatattgaaacactcttttaattaacggcgtcattgataaaaaataaatgtagctgagaagcagaataagcttaaacagactttcgattccgatctgcgcggcgtctgaggaaaatacgggccttacaagctccgctaagaagaccgggacgagcgtaaaaacgaatttgctgaacaaaaacgacagaacgccgatcaccgccaggctgaaaaacatcgataagcccgaacctttcttatcttcctggtccagctttgcgtcatcttgaggatcaagcccgtaacgttcgctggaaaagtttaaatgctttgtgccgttggcgctcgcctcaatgatggcgacgattccccgcaaaaaaggaatcttttttaaagccgaaagcttggcgttcggcactctcggaagcttgaaaaaatcaatgcttccgtcattcctgcggatggcggtaacataattttttctgccgccgaacatgaccccttcaacgacagcctgcccgccgtaagcagggggcgttttttgtttggacattgtttatcaacctgcctgtttttttaggatttactaaccatttcctttcactctattgtacaggaaaccgcggtaaacctctagttagacagccggaaaatcaatgctttttctacatgcagtataccccgtttctttagattttactcattgaatgaaaatatggcgcagctttttatgacttttcaattttggggcagtctatgactggaggtgccatgatgacaagcgaaaaacattcagaacaggaagaaaaaaagaagcaggatgatgatcagcagcctgtttcatttaccggcagaatttgcggtatcggatttgccggcggtgtattttggagtttgatcggatatctcgggtatgtctttcatttttcagagatcagccccaacatgattcttcagccgtttatgatcggagaatggaaaaaacaatggctcggcacgatggtcagcatcgttgtcatcggattcatttcaattgccggggcgtttatttatttcgtctgcctgaaacgttttaaaaccatgtggccggggatggtgtacggcgtcattttatggtgtgcggtttttttcttattcaatccgattttcgaagatgtgaaatccgtcactgaattgaaatcagatacaatcgtgacgacgctttgcctttacattctgtacggtttgtttgtcggctactcaatttccttcaactacaatgaacttacgtcagacaagcttgcaagggcgctcggcaacaagtgaataagtgtataatccctgtccggtatggtaaaatgttcacgagaagtgaacattttttatgctgaaaaccgggcggggatgctcccgcgttgtcaggcggcagtcaagaatcggcgaggaggagaaagggaatgaaacttgagaaattgcgaaatcttttcggtcagctggatatagacggaatgttggtgacaagctccgccaatctgcagtatatgacgggatttacgggttcgtcaggccttgcggtcatatcgaaagaacgtgcggcatttatcacggatttccgttacaccgagcaggcgaagacgcaagtgaagggttttgacattatcgagcacggcggaagcttaatccaaacggctgcggatacgattcttgagtacggcattaaaaaactcggcttcgagcaaaacagcatgacgtacggaacatatgcatcctaccaagctgtgctgcaggaagcggagatggttcccgtcgcggattccgttgaaaagttgcgcttgattaagtcaagtgaagagattaagatattagaggaagctgcgaagattgcggatgatgcgtttgaacatattctgacgtttatcaaaccgggcatctcagagatttcagttgcaaacgagcttgaattttatatgagacgtcaaggagcagacggctcttcctttgatatgatcgtcgcctcgggagttagatccagccttccccacggagtggcaagcggcaaattgattgaaaagggagacttggtcacgctcgatttcggcgcttattataaaggctattgttctgatatcacacgcaccgtcgcggtcggagagccaagtgataaactgaaagagatttatcaggtcgtatacgatgcccaagcgcttggtgtcctgcatattaaacccggcatgacgggaaaagaagcggacgccctgacgagggatcacatcaccgcaaaaggctacggacagtatttcggccattcgacaggacacgggttcggaatggaagtccatgaatcaccggggctgtctttcaggtcatcggccgttcttgagccgggcatggcggtaacggttgagccgggcatatacataccggaagttgggggcgcaagaatcgaagatgatatcatcatcactgaggacggcaaccggacaattacgcattcccctaaagaattaattattttgtgatcggaatataggaggacatcaaacatgatttcagttaacgattttcgtacaggactaacgattgaagtagacggcggcatttggcgcgtcgttgacttccagcacgtaaagccgggaaaaggagcggcatttgtccgttctaaattgcgtaacctgcgcacgggcgctattcaggagaaaacattccgtgcaggtgaaaaagtcgcgaaagctcaaattgaaacaaaaacgatgcagtatctttatgccaacggcgatcagcacgtgttcatggatacaagctcatatgaacagcttgaattgaacgaaaaccaaatcgaagaagaattaaaatatcttctggaaaatatgtctgtgcacatcatgatgtaccagtctgaaacgctcggtattgaactgccgaacacagttgaactgaaagttgttgaaacagagccgggaattaaaggcgacacggcgtcaggcggcacgaaacctgccaaaacggaaacaggtcttgtcgtaaacgtaccgtttttcgtgaacgaaggcgatacgctggttgtaaatacatcagacggttcttacgtgtcaagagcgtagttaaagaaattcggagtctgctccttttacggggcaggctttttttgcgttctgcctcataatctttcttctatatgaaaatagtgagactacttccgtcagctagagcatatagtgtaacaaaatgcttgaagttgggggattgcaatgaaatttttgtttggttcaatcaattctactgttttaacgatggccggtttacgagttttgtcctcgctcattgaattatcggccgctattatcatgcttttgacaaacgacatcagaaaagcggttgtggtgaatagtattttggcaatcgtcggcccgctgatctttatcatcacaatgacgatcggcatttatcagattgccggacagctctcatatgcaaaattaatattgatttttgcgggagtggtgctgattttggccggtgtgcataaatagagggccggggtgtcataaagtctgtcccggatcatacattttaaagaagccaatcggtaaaaaaggaggagactctattgaatgagattacagaggttctccctgaattattgagacatgccatctccgccgtgcccgaagcagcgaggcgggatacagaagaaatcagaatccgtgtcgacaggccggttgaactgatccaaaaaggacaacctttgtatttgtcatatgtctgtacggccggcgacgcacagctgatcctcagccggctcagcaattacagtatgtacacgctggaagaagagctgaaaaaaggatatatcacaatcagaggaggccaccgagtggggctggccggaagagtcatcgtcgaaaacggagctgtcaaaggactccgggatattacttcttttaatatccgaatcgcccgggagaagctgggaatcgcagaaccgctcattcctttcttatggaaagaaaactggctgaatacgctgatcatcggtcctccgcaaacggggaaaacgaccttgcttcgtgatttggcccggctttccagcaccggatcaaaacgcattcctgcaaaaaagacaggtatcgtagatgaacgttcggaaattgccggctgcctgcggggcattccccagcacagtttcggccgcagaatcgatgtccttgatgcctgtccgaaggcggaagggctgatgatgatgattcgctcgatgagtcctgatgtgataattgtggatgaaatcgggagaatggaagactcacaagcgctgctggaggcgctccatgcgggcgtatccgttatcgtatctgcgcacgggtggaatatgaaagacttggtaaagaggccgtcgctgaaaatgctttgggaggaaaacgtgtttgaccggtatgttgaactgtcaaggcgccgcggtcccggaacgatcagcaggatgtacggaaaggacgggaaacctgttccgcatgctgaaagcgtgatgacatgctgaagcttttgggtgccgtgtttattctgacagcgacgacttggaccggatttgagatcgccaaaatgtatatagaaaggccgaggcagatccgccagctgcgcgcggcgctccaatcgctagaagcggaaattatgttcgggcatacaccgctgcataccgcctcgggacaaattgccgcacagctttccaaacctgtatcattattgtttcaagctttcagcacaaggcttgagcagggaagcgattccgccaaaacggcttgggaacagagcttgaaacataattggtcttccatggcgatgaaaaaaagcgaatatgatgtgctgaagcaattcggagagacgctcgggctccatgaccgtgtttctcagcagaaacatatcaagcttgcgcttacacatttggaagcggcggaagcggatgccggacgggcgcaggcgaaaaatgaaaaaatggtgaaaagcttaggatttttagccggactgttactcattcttctattgatgtaaacatgaggggagcaaacataaaatgggagtcgacgtaaatgtcatttttcaaatcgccggagtcggtatcgtggttgcgtttctgcacaccatacttgaccaaatgggaaaaaaagaatacgcccagtgggtgacgctgcttggctttatctatattttatttatggtggcgacgattgtcgatgacctgttcaaaaagatcaaagctgtgtttctattccaaggataggggggcttacagattgagattgttcaaattgtaggtttaggcctgatcgccacatttctctccctgatcgtaaaagaacagaaaccgactttcgcgtttatgattgtcgtcttcagcggctgcgtgatctttctttatctcatcgaccagatttacgacattatcagaatgatagaaaaaatagccgtcaatgcaaatgtcaatatggtctatgtggaaaccattttaaaaattatcggcatcgcctacatcgctgaattcggagcgcagcttacaaaggatgcgggccagggagcgattgcttcgaaaatagagctggccggaaaaattttgatactggtaatggccgtgccgatactcaccgtcattattgaaacgattctcggacttattccttcttgatcaaaaataaaatggaaagggggggcacaaaaaatgaagcgctttcggtgggcgggagcttttttgttcatcctcttattttttcagactgaatgtgtacaagctgccggaacagacggtgcgtcgcaggaaaccgcagttcaccaagaatccgctgatgaagtggcgaaaaagcaggccgaagcgctgaaaacagaaggcatcggaaagttttgggacgacatcatgacagaatacggcggtcttctgcctgaaagccaaaagggaagcatcatcgactttattaacggagaaaaaacgttctcgccggaggcatggctgaaggctttattttcatacttgtttcatgaagtgctcgcaaacggaaagcttctgggaactttgattcttctcaccattttttgtgtcattctgcagctcctgcaaaatgcgttccagcagagcaccgtcagcaaagtggcttatgcaatcgtctacatggtgctgattattctcgctttaaacagctttcatgttgccgtcaattatgccagtgaagcgatccagacgatgacaagcttcattctcgcgctcatcccgcttttactcgcgcttttggcgtcttccgggggagccgtctccgcagctttttttcaccccgttattttatttctgatgaatacgagcggccttctcattcaaaacatcgtcatgccgcttatcttcctgtcagcgattttaagcatcgtcagcacgatgacggatcaatataaagtcacgcagcttgccaatctgctcagaaatatcgcgatcggcgcgcttgccgtatttctcaccgtgtttctcggcgtcatctccgtacagggggcttcggccgccgtgacggacgggattacgctcaggactgcaaaatttataacaggcaattttattcccgtgctcggccggatgtttacggatgcgacggatacggtcatcagcgcttcgctcctattaaaaaacaccgtgggaatcctcggagtcggaattttgatctgcatctccgcgtttccggcgatcaaagtgctctcgctcgcttttatttataagcttgcggccgctattctgcagccgctcggaggcgggcccgtcattacgtgcctcggcgtcatcagcagaagcgtactgtatattttcgcggcgctcgccatcgtctctctcatgtttttcctcagcatcacagtcattattacagcaggcaacctcaccatgatgatgaaataaaggaggcccattggatatgagctttttaacagaatggctgacaagcattattttatttatcttattcgccatcgtcatcgacatgctgctgcccagctccagtatgcaaaaatacgcaaagatggttgtcagcctgctgttaatcattgtcatgctcaacccgatattcaaacttttcaaaacagacccggaaatcatcttcgattatttgacaaaacaagagcaatctcaatccgctgatataaaaaatcaaattaaatcagaaaaaaaagaaatacaagcatcaaaccgcgcatatgttttagaagaaatggctgtccaactaaaaaagaaagcggaggagatgttcagtcatgacgaatacaaaatagacgacatccgccttacagcggaagaacaggttcgttcagaagaagatgtaaaaacgatcagcgtgtatatggccccatcttctgaaaaaaccgtgcaaaccgtcgcaccgatcgacatccgcacagaccgcaaatacgaaccggaaggcgcagccgacaaaaaagaggccgcagacatcaaagaaaaacttgcggatatatgggaaatcggcagtgagaaaattacggtttatatggaaggcggggagaaaaacggccatgaataaaaacggactatggaccatactcaaaaaacagctgatgatcggacaggcgaaagacggagaaaaaccaaaactgacaaaatatcattactttctgttcgtgtttgtgctcggggtatcttttatgctggtcagccagctgttctcttcaccggagaaaaccgagaaggaccaaacggcgcagaccgtcatgtccggccgaacggaagacaaaagcgggcaaaaaagcgcacccgtttttaaggcatcgaaagacggcagcgcaaaaaccacaatcgatgattacgaaagagactatgaaaaccagctgaaagaaatccttgaaacgattatcggcgtggaggatgtctcaattgtcgtaaacgtagacgcaacatctctgaaagtgtttgagaaaaataaaacgaaaaaagacaccaccactgaagaaaccgataaagaaggcggcaaaagaagcgtaaccgatcaaacctctgaagaacaaattgtcatgattcgaaacggggaccaggaaaccccggtcgtcgtccagacgaaaaagcccgatatccgcggtgtactcgttgtcgctcagggagtggacaacgttcaaataaaaaaaaccatcattgatgccgtcacaagggtgctcgatgttccgagctatcgtgtagcggttgcccctaaaaaaatcaaggaggattcataaatcatgctgaaaaaacaaacggtttggcttttaacaatgctcagtctcgtcgtggtattaagtgtttattatattatgtcgccggaaagcaaaaatgccgtgcagatgaaaagcgaaaaaagcagcggagaagtcgccactgaaaaaacgccggctcctgaaacgaaagataagagcggaaacggaacggaaaaagaagacggcacaaaaggaacgaaagattctaaaggcacaaaagaggataaagaaacatcagccgaagcatcggacaaagacggatcggtcgccacagaaacagctgatgaaaacttatttaccgcataccgcatggagcttgaagacgcgagaagcaaagaaagggaacagttaaacagcattgtttcaagcgatgatgcgaccgcaaaggaaaaaagcgaagcctacgataaaatgacggcgctgagcaatgctgaagggacggaaaaacagctggaaacgctgattaaaacacaaggctacaaagatgcgctcgtggatgctgaaggagacaaaatcaacattaccgtcatgtctgacaaacattcaaacgcaaaagcttccgctatcattgacctggtggaaaaagaaatcaagacgatgaaagacgtcgccgtcacgtttgaaccgacaaaataagagacctgaaccgcccgcacccgctgcgggcttttctgatgtcattttagatcagtgttgaatttacacaagcgctcctgtaagataaacatagtatgtacttttagtagcaacccataaatttctattttttatacataggagtggaaactgatgttaaaaatcaacgaaattcatgaactgataaaaagaatcgatgaatcttccatcgacgaatttgtttacgaaattgaaggcgtaagcctcaaactgaaaaaaaatgaagcgccggcagtgaatgtaacgggacaagcccaagccgttcccgccgcttacgcacctgctccgcaggctgcaaaaccggaagcgagtgaagccgctcctgctcaggaagcgccgaaacaagacgaaaacctgcacaaaattacgtctccgatggtcggaacgttttatgcttcttcatcgccggaagccggcccttacgtaaaccaaggttcaaaagtgagcgaaaatacagttgtttgtatcgtagaagcaatgaaactctttaacgagattgaagccgaagtaaaaggagaaatcgttgaagtgttagttgaaaacggccagctggtcgaatacggacaacctctatttcttgtaaaagctgagtaaggagacctgctattatgattaaaaagctattgatcgccaaccgaggagaaatcgccgtcagaattatccgggcctgcaaagagctgggcattgaaactgtagccgtttattctgaggcagataaagacgccctgcatgtccaaatggccgatgaggctttttgtatcgggccgaaaacatcaaaagaaagctatttaaatgtaacgaacatcgtcagcgtcgcaaagctgaccggcacggatgcgattcatccgggatacgggtttttagctgaaaacgccgactttgccgagctgtgcgaggaattaaacgtaacgtttgtcggccctacggctgacgccatttcaaaaatgggaacaaaagatatcgcccgcgacacgatgcagctggcgggcgtgccgattgtgcccggttcaaaaggaatcataaaaaatacggaagaagcggtttcgcttgcaggtgaaattgggtatcctgtcattataaaagccactgcgggcggaggcggaaaaggcatccgggtcgcacgcacagaagaagaactgatcaaaggcattgagattacccagcaggaagccgctacggcattcggaaatccgggtgtgtacatcgagaagtacatagaagatttccgccatgttgaaattcaggtgcttgcggataattacggaaacacgatccatctcggagagcgtgactgttctatccaaagacgtctgcaaaaacttcttgaagagtcaccgtcacctgcgcttgattctgaaatcagggagcagatgggtgaagcagcggtaaaagcagcgaaggccgtcggttacacgggagccggcacagtagaattcatctatgactacagagaacagcgctactacttcatggagatgaacacgcgtattcaagtagagcaccctgtcacagaaatggtgacgggaacggatctgatcaaagaacagatcaaagtggcatccggacaggagctttcgctcagacaggaagatgttgaatttaacggctgggcgattgaatgccgcatcaacgctgaaaaccctgcgaaaaacttcatgccttcacccggtaaaattaacatgtacctgccgccgggcggacttggcgtacgcgtggattcagccgcatatcccggctattcgatcccgccgtactatgacagtatgattgctaaagtcatcacatacggaacaacgcgtgatgaggcagtcgcacggatgaaacgcgcgctgagcgaattcgtgattgaaggtattgaaacgacgattccgttccatttgaaactgcttgaacacgaaacatttgtcagcggagagtttaatacaaagtttttagaaacatatgatgtaatgggctcataatttttgcgggaggtgaattgaatggaagacaacagtgtgcttaaaatggatcatgatgaggctcatttaggcaaggttgaaattgctcctgaggtcattgaagtcattgccggcatcgccgcttccgaagttgaaggagttgctgaaatgcgcggcaatttcgccacgggcgtcgtagaacgcttcggcaaaatcaatcacggcaaaggcgtaaaggtcgatttagccgatgacgggattaccatcgacgtctattgcgtcgttcaattcgggatctcgatcccgaaagtggcggcaagcgttcaggagaatatccgccaaaccttattaaacatgacgtctctgaccattaatgaaatcaatattcatatcgtcggcattcaatttgacacgaaagcccaagaagtcgaaatcgacgaagaaatgtaatgagcgtataaaaaccaaggggatgggcagccctttggttttttatacgtttcccgtcatttcaggcatgaagaaagccggcttacaaacggcagccgagtttcttcatgctgtgaaatccgaatgaaattaatacggtttgtgaaaatattcggcattagggtgaaaaaacctaaatttcgacatgcgattgagaaaaaaatatgttatgatctctttaagcttaacgacaagcggataaagcggatctgaaggagaaagaaaatgaaaagaagaacagctagagaaaaagctttgcaggcactttttcagattgatgtcagcgatattgcaccgaacgatgccattgagcacgcgcttgatggtgaaaaaacagatgccttctttgaacagctggtgtacggagtgatcgaacatcaggttcagcttgatgaaatgatttccggccatctcgtcaattggaagcttgaccggattgcaaacgtagaccgcgcgatcctgcgtctggcggtgtatgaaatggtttattctgacgacattcctgctaacgtgtcattaaacgaagcaatcgagctggcaaaacggttcggcgacgataaagctgcaaaattcgtaaacggggttctttctaacattaaaactgatatcgaatcataggaggaaagaaaatgactgcaacaatcatcgacggaaaagaaacggctaaagaaaaacgcgaacaattggcaaaagaagtagaagagctgaaagcacaaggcgtagtgcctggattggcggtcattttaatcggagacgatcccgcttctgtttcatatgtgacaggcaagaaaaaagccgctgaaacaatgggaatgaaatttaagcttgaccgctttgactcaagcttaaccgaggcggagcttttaacagtgattgatcagtataatcaaaatccggaattccacggcattctcgtccagctgccgctcccggatcatatttctgaaaaagccgtaatcgagcggatctcccctgataaggatgttgacggtttccaccctctcaacgtcgggaaaatgctgcttggcgaagatacatttcttccatgcacgccgcacggaattgtcgagttattgaaaaagacgaacgtagatctttccggcaaagaagttgttgtagtcggacgaagcaatattgtcggtaaaccggtcggccagctgctgctgaacgaaaacgcgaccgtcacatattgccattcccgcacgaaaaatatgtctgagcatacgaaaaaagcagatattcttgtggtagcggtcggtaaagcgaacttcatcaaagctgatcaaatcaaagagggcgccattgtcattgatgtcggcgtcaaccgtctcgaaagcggaaaactctgcggagacgttcagtttgatgaagcgaaagaaaaagcatctttcattacgccggtgccgggcggagtaggtccgatgaccatcacaatgcttgcgcataatactgttaaatctgccagacgtacgttatcatagataaccggagacagtcacaaaaagtgtgacaatgagcacgatacccgcttcttaaggctcctttcagccagagcgggttttcttagtttagggcaaaaagcctttatgaaaggagtgcaggatgtgagtgaagcggcatatgtcacggtttccgcgctgaccaaatacattaaaagaaaattcgatgtggaccctcatcttgaagacatttggattaagggtgagctctccaatgttaaaattcatacgagaggccacatctattttacattaaaagatgagcatgcccgcatgcaggccgtcatgtttcagaggcaaagttcgaggcttgcgtttaagccagaagacggaatgaaggtcatcgtaagaggcggcatctccgtctatgaaccgagcggaagctatcagctgtacgcgaaagaaatgcagccggacggtgtgggggcgctctacttagcctatgaagaattaaagaaaaaacttgccggcgaagggttgtttgatgaccggcataagcaggccatccccgcttttccggccacgatcggggtcgtcacgtcaccgacgggagcagccgtcagagacgtcattaccacactcaaaagaagatacccccttgtgaaagtcattgtgcttcccgcgctcgttcaaggtgaaaatgccagcagatcgattgtgaagcgcattgaagaagccaatgcacaaaaaatgtgtgacgtcctgatcgtcggaaggggagggggctcgatcgaagaattgtgggcatttaacgaagaaatcgtggcccgggcgatttttgcttccgccattccgattatatcagctgtcggacatgaaacagattttacaatcagtgatttcgtcgcggatatccgggcggcaaccccgacaggagcggcagaaattgccgttccccacacgacggacttaatggaacggacaaaaacggcggaagtccgcctgacaagagcgatgcagcagcatatcaacaagaaaaaagaacgggttcaatcgctccagtcatcctacgcgttccgttttccgaaacgattgtatacccaaaaagaacagcagtttgaccttttgtatcagcagttccaatcacagctcacagggcttacggacaggaaacaaaggcagctggagcggaatacgtacagattaacggcgctccaccctgaaacccagctgaaacaggcgaaaaaacggtacgaggagcgctcaaatcagctcgcccgaagcatgaatgtccagctgaagcagcttcattcgcagtttcagacggttcttggtaaactgaatgcattaagtccccttcaggtgatggagagaggatacagtctggcctataaagacaaagagctgatcaaaagcgttgatcaagtggaacaaaatgatacgcttgaagtaaagatgacagacggcgttctgacgtgtgaagtattgcaaaagagaggcgaacgataatgacagaaaccaaaaaaagtgaagagctgacatttgaagaggcgatgaaaggccttgaaggcattgtggcaaagcttgaagaaggagatgtgccgctggagcaggcgattaattattttcaggaagggatggccctttcaaaaatgtgccatgaaaagctgcagcatgtcgaaaagcaaatggactttattttaaaagataacggcgaacttgcacctttcagcgttcaggaggaagacgaaggtgacaaataaactggacgcatttttagcatcgcgcaaacaactgattgaacagcagctttctttgtatacagaacggcttgcgatgccggaaacccttaaaaaatctatgctgtattctttggaagcgggcggaaagaggctgcgccctctcgtcgtcttagccgttctgaatgcttacggaaaagatgaaaaagacgggattccggtcggatgcgctgtcgaaatgattcatacgtattctttaatccatgatgatctgccttgcatggacgatgatgatctgcgccggggaaagcccacaaaccataaagtcttcggagaagcggcagccgtattggccggagacgggcttctgacagaaagctttaaattgatcacatctcatgtgtctgaggcggtttcagcagaaaaacggctccgtctcgtcgatgagctgatcagcgcggcgggaacggaaggaatggtcggcggacaggctgccgacatggaagcggagcaaaagcggataacgcttgaggagctggaatccatccacgagcggaaaacggccaagctcctcggtttttccgtgacggcgggcgccattttggcagatgcgccggaggatgaagtcgaaaagctccgtttgttcagcagccatatcggcatcggatttcaaatcagagacgacatccttgatattgaagggcatgaggagaggatcggcaaaccggtcggctcagatacgtcgaatgaaaaatcaacgtatccgtcgcttttaacgcttgaaggtgcgaaagaaaagcttgcgtatcatatcagcgaggcgaaacagatcatcagcggcctttctcttcagaaagaattgctgcatgacctctgtgatttaatcgcggcgagagatcattaaaaacggtcctgatttgaaggggctgccgctcctatggtaaaatgtaagcagtttcgatgaaaatacaaagggagtctttttcttttttcaaaaagacactgtttaatttgcagaaattcatgctgaaagtgagttgatccgctttggatcttttatcaatacaggacccgtcatttcttaaaaagatgtcaattgaacagctggaagagctgagtgaggagatccgcaatttcctcatcacatcgctgtctgcctctggcggccatatcgggccgaacctcggggttgtcgagctgacaattgcgcttcacaaagaatttgacagtccgaaagataaatttttatgggatgtcggacatcagtcctatgttcataaactgttaaccggacgcggcaaggagtttgaaaccttgcgccaatataaagggctttgcggtttcccgaaacgcagcgaaagcgaacatgacgtatgggaaacaggccacagctcaacctcgctctcaggcgcgatgggaatggctgccgcccgtgatattaaaggatcgaaagaatatatcatcccgattatcggagacggcgctttaaccggaggaatggcgcttgaagcactgaaccatatcggtgatgagaaaaaagacatgatcgtcatcctgaatgataatgagatgagcattgcgccgaatgtcggggcgattcattctatgctgggacggcttcgcacggccggcaaatatcaatgggtaaaagacgagcttgaatatttatttaagcgcatcccggccgtcggcggaaaattggccgccacagctgaacggataaaagacagtttgaaatatatgcttgtgtcaggcatgttttttgaagagctgggctttacgtatttaggcccggttgacggtcattcctaccacgaactgtttgaaaacctgcaatacgccaaaaaaacgaaaggccctgtccttttacatgtcattacgaaaaagggcaaaggctataaaccggctgagaccgacacaatcggcacatggcacggaacgggtccttataaaatcaatacgggtgatttcgtcaagccgaaagccgcggcgccttcatggagcggacttgtcagcggcaccgtgcaggagctggcgcgcgaggatgacagaattgtcgccattacaccggccatgccggtcggctctaaactggaagggtttgcgaaagaattccctgaacgcatgtttgatgtcggaatcgcagaacagcatgcggcgacgatggcggctggaatggcgctccaaggcatgaagccgtttcttgcgatttattcgacctttttgcagcgggcgtacgatcaggtcgtccatgacatctgccgccaaaacgcgaatgtatttatcggcattgaccgcgccggtttggtcggcgccgacggggagacgcatcaaggcgtctttgacatcgcctttttgcggcatataccaaacctcgttttaatgatgccgaaggatgaaaatgaaggccgccatatggtcaatacagcccttaattatgaggagggtccgatcgcgatgcgcttcccgcgcggaaacgggctcggcgtaaagatggataaagagctgaaaaccattccgatcggaacatgggaagtgctccgtcccggaaaagacgcggtcattttaacattcggtacgaccattgaaatggcgctggaagcggctgaagaactgcaaaaagaaggcctgtccgtgcgtgtcgtgaatgcgcggtttataaaaccgattgataaacaaatgatgaaggccattcttaatgaaggtctgccgattttaacgatagaagaagccgtgcttgaaggcggattcggcagcacgattcttgaatacgctcatgacctcggcatgtatcatacaccgattgacagaatgggcatcccagaccggtttattgaacacggcagcgtaaccgccctgcttgaagaaatcggtctcacgaaggctgaggttatgaaccggatcaaactgctgatgccgccgaagacacataaaggaattggatcatgacagcaaaaaaagaacgattagatgtacttcttgtagaaaaaggccttgcggaaacgcgggaaaaagcgaaacgcgccattatggcgggcatcgtatactcaaatgaaaaccgattggacaaaccgggtgaaaaaatcgcccgggatcttccgttaacggtaaaaggaaaccctcttaaatacgtcagcagaggcggattaaagcttgaaaaagccctggaagtgtttcccgtctcggtaaaaggcaaaacgatgattgacatcggctcgtctacagggggattcacggattgcgccctccaaaacggagccgagcggtcctacgcagtggatgtcggctataatcagcttgcctggaagctcagacaggacgagagggtcgtcgtcatggaacggacgaatttccgctattccgagccttccgatttcacagagggtttgccggaatttgcgacaatcgatgtttctttcatctcactccgcctcattctcccggttttaaaaacgctgcttgtaccggggagcgattgtatcgcactggtaaagccgcaatttgaagccggacgggaatccgtcggaaaaaaaggcattgtcagagatcccggcgttcatactgacgttctccgccgcatgaatcaatttgccgcttctgaaggatatacagtgaaaggactgtccttctcaccgattacagggggagacggtaatattgagtttctgcttcatttggaatggggcggagaagacggaaacggcgctgaactgccggaagaagacattctccgtaccgtccgcgaagcacatgagacattaaaagccaaaaagacagatgtaccggaataatagggggctattattccttttttctgccatcatgtactttttatcaagaagcggttaacataatgacaagaacagcttgaaaacagaggtgcttacatgacaaaaggccaaaggcatataaaaatcagagagcttattacaagccatgagattgaaacgcaggatgacttagttgacatgctgagagaagaaggatataaggtaactcaggcgactgtctccagagacattaaagagctgcatctcgtaaaggtgccgacgaacaacggctcctacaaatacagcctgccggcggatcagcggttcaatccgctgtcaaaactgaagcgttcattaatggatgcgttcgtaaaaattgactcagcaagccatatgatcgtattaaaaacgatgccggggaatgctcaggcaatcggcgctctgatggataatctcgaatgggaagaaatcatgggcacgatttgcggagatgacacgatcttaatcatctgcaggacgcctgaagatacggagggtgttcaaagccgtcttttggagctgctgtagcgtaattatcagataaaaggtggaatgctgtttgttagctgaactatcaataaaaaactttgccattatagaggaactgacgatttcgtttgagcgggggctcaccgtcctgacgggagaaacaggggccggcaagtcaattattatagacgccgtttccctattagtcggcggccgcggctcgtctgaatttgtccgttacggtgaaacaaaggccgagcttgaaggactgtttcttttggacagcggtcatcccgtttttgaagtatgccgtgagcagggaatagacgcatctgacgacatgattgtcatgagaagggacattaatgccggaggaaaaagcgtctgccgtgtcaacggaaaattagtgacgattgcggctttgagggaaatcggcagacttttattagatattcacggacagcatgataaccagctgttaatggaggacgataaacacttagagctgttggacaggtttgcgggcgctgaggccgaatccgcgcttcaggcttaccatgaaggctatgagcgttatatgaagctgctcaaaaaagtgaagaagctgtcagaaagcgagcaggaaatggcgcatcgattagacctgattcaatttcagcttgaagaaatcgagtcggcgaagcttgaattgaatgaagacgagcttcttcaggaagagcggaagcagatatccaactttgaaaaaatttatgaatcattgcaaaacgcctataatgcgctccgcagcgaacagggggggcttgactgggtcggaatggcctctgcccagcttgaagatatttcggatatcaatgaaccgctgcaaaagctgtcagaaagtgtgtcaagttcctattatctgctggaggatgcaacctttcagatgcgcaatctgttagatgatctggaatatgacccggaacggctgaattttattgaaacccgtttaaatgagatcaaacagctgaagcgcaaatacggagcgacggtagaagacattttggaatacggctccaaaatagaagaggaaatcgatcagatcgagaaccgcgacagccaccttgaagcgctgaagaaggaattggagtcggtcggcaaagatgtggccgtagaagccgccaatttatcaaaaatcagaaaagcatgggctaagaaactggcggaagcgattcatcaggaattaaaaagtctgtatatgggcaaatcaacgtttgatacggaatttctcgtgaaaaccgatccgtcagccagtgaagcaccggttgttaacgggcagcccgtgcagcttacccaaaaggggattgaccttgtgaagtttttaatttcaacaaacaccggtgagcctttaaaaccgctgtcaaaggtcgcttccggaggcgagctttcaagggtgatgctggcgatgaagagtattttttcttcccagcaggatgtcacctccatcatctttgacgaagtggacaccggtgtaagcgggcgggttgcccaagccatcgcggaaaaaatccataaagtatcgaccggttcacaggtgctctgcattacacacctgccgcaggttgccgctatggcggatacgcaccttctgatcgcaaaagaattcaaagacggccggacgacaacgcatgtcacgccgctttctaaacaggacaaggtagcggaaatcggccgcatgattgcgggcgtcgaagtgaccgatctgacaaaacggcatgcacaagagcttttaaaacaggccggacaggtaaaaacgacaggataagctgctgatacaggcagcttatttttttgttccatttctctaacagtgtatccaatgtttttcttcatatgccggttataaatcaagcgcaggaaggcaaaagtatagatgtagcagaaaaagaaagtggtgtgggataggagcgaggagagtgaaggaatgaatgcacgataacatgaggaaagcaataggtgtaattctccttgtttctttactaagtgtaggcttttttaagccatttaaagaatatttactgataccatcagaaatgagcgtctttgaaaaccagacacaggccgttccggttaatgcatcaataagcgctgaaaagggcgaattatcagaagcctttacgctgaaagaagagcacggccatgcaaacataacagggcaaacacatggccggtcagaagtagtatatgatcttgccggatttcccattaaaaaaacgaaagtgcgtgtccttccagaattgaaggtcattccgggcggacagtccatcggtgtaaaactgcattcagtcggtgttttggtggtcggttttcaccaagtgatgacaaaggatgggaaaaagtctccgggagaacaagcgggaattgaatctggcgacatcattattaaaatgaacggacataaaattgaaaaaatgagcgatatcgccccgtttattcaaaaagcgggcaaaaccggtgaatctttggatttattggtgaaacgcgataagcaaaaaatcaaaacaaagctgattccgacaaaggacgaagccgaggggaaatatcgaatcggcctttatatccgcgattccgcagccggcatcggcaccatgacattttttgaaccgaaaacaaaaaaatacggcgcattgggccacgtcatctctgatatggatacaaaaaaaccgattgttgtagaagacggagaaatcgtccgttcaactgtaacatcaattgaaaaagggaaaggcggcaatcccggcgaaaaactggcaaggttttcgtcagaacggaaaacgatcggcgatattaaccgcaacagcccgttcggcatcttcggaacactgcatcagccgattaaaaacaacatttccgacaaagcgcttccgattgctttgtcaaatgaagtaaaaaaaggacctgcgcaaatgctgacggttatcgaaaacgataaagtagagaaatttgatattgaaatcgtcagcaccacgccgcaaaaattcccggcgacaaagggaatagtgttgaaagtgacagatccgaaactgctgaaaagaaccggcggaatcgttcaggggatgagcggaagcccgatcatccagaacggaaaggtcgtcggagccgtaacccacgtatttgtcaatgatccgacaagcggctacggcgttcatatcgaatggatgctgtctgaagcgggtgttgatgtttacgggaaagacaaagcaagctgactgccggatgatccggcagtttttttatgtgatgcgttcttcacttctttcctggattcatgtaaaataagacatgaagatttttcgacaaattcacgtttcctgatttgtcaaacttaatttttagtcgaaaaacctagaaaatgctagaaaaacaaagatataccactattattggtaaatatggattttttaaaaggggaagtagtggttttgtcgaatgtaacatgtagcagtcaaatgggttgcgtcctgttaatacattgggggaggaagaaacgtggagaaaattaaagtttgtgttgctgatgataatcgagagcttgtaagcctgttgagtgaatatatagagggacaggatgatatggaagtgatcggcgttgcttataacggacaggaatgtctttctttgtttaaagataagaatccagatgtgctcgttttagacattatcatgccgcatctggacggacttgcggttttggagcgtctgcgggaatcagagcttgagaagcagccgaacgtcatcatgctgacggcattcggtcaggaagacgttacgaaaaaagccgtcgatttaggcgcgtcctatttcatcctgaagccgtttgatatggaaaaccttgtcggccatattcgccaggtaagcggaaatgtcagcagtgtcacacaccgtgcgccgtctgcgcaaagcagcattatccgcaaccagcctgagccgaagcggaaaaatctcgatgccagcattacaagcattatccatgagatcggtgtgcctgcccatatcaaaggctatctttatttgcgtgaagccatttccatggtgtataacgatattgaactcctcggcagcatcacaaaagtcctttatcccgacatcgccaaaaaattcaacacgactgcaagccgtgtagaacgggccatccggcacgccattgaagtcgcatggagcaggggaaatatcgattccatttcttcactgttcggatatacggtaagcatgacaaaagcaaagccaaccaactcggaattcatcgcgatggttgctgacaagctgagattggagcataaagcttcgtaacgcaagcttttggctagatgtctttttcgcgccttctattccgtgcatgaacgcggaagagaaggcgttttgaaattttgctggcgaaaacaatggaaatcattcatgccggtacttgttctatacataaatgcgggatctatgccgtctacacgtataataccggagctgatattttaatgattttgccgtctctaaaataaaagcgggggacgcggcggcttaacacagataagacttcgtagctgatcgtaccgagcatttcggcaatttcatcaacggaaatctcggctccttgttgtttaccgtagatgacgacttcttctccttgtttgccctcattctcacctaaactgaccatgatcatatccattgtcactctccccgccaccggcacccgtctaccgcggtgaagaataaacccgcggttggacagggcgcgggagtaaccgtcaccatagccgatcggaatcgtcgcgatgatttcacccggttcggcgatatatgtggcgccataactgacggtccggggatctttcaccatggctttcacataagcgatacgcgcctttaaacttagtgcgggtgtgagatccacgaggttcagttcctttatcgaggcggacggatataaaccatataacccaatgcctaaacggatcatgtcggcgctgaattccgggaatgcgatagcggcggctgtattgcacatatgcacggtaggcagcgtaatgtcttgattttttaaaaagcggagaaagctgataaacttttcgtgctgcagcatcgtcagctcagtgtccggttcatccgctgttgaaaaatgtgtaaagatgccatcccatgacagatatgtactcgacttgagcgctttcaccactgctaaaagatcttcttccgtacgcacacccagccggcccattcccgtatccacattgatatgaatggacagccgtttcgaatctgcttctttttccaatatccgattcgcttttttgatccagctgacttgaaacgctgataatgttatgttccaaacggcagattttttcacacagctgagagctgtgaagccgagcacaagaataggtgccgtaattcccgctctccgtaacacaattccctcttcgacgctggcgacagcgagctcgctcgctccgctttccagtgcctgccgcgctacttcaacagagccgtggccataagcgttcgcttttacgacggccataattttagacgtattcggaatatggcggcggatcgcccgtacgttcttttttatcgcatcaaggtcaacttcaatccaaacttcccggcaaagttttttcatcacgattccttctttccttaatgagattcagtactcatgctttcaatctgcattctattcatctttaactgaaatcattcaaaacatggaaaggtgatcgctgatgtttaaaatcaagttttcgggaaatcagtgtgcctgctttatttatgcagttagggctgcttggcagcccttaaattgactttacaatattctgatctgaaaattgatgttcaaacattttggactggcttacagcattgttttgaatgacaatgccgatatttccccctccggcaccgaaaacggtttttgatgcagtcagcggactgatggatatggcgccgccaacattgacaactccgtttcctgatacgttgtttatcgtaatcgggcaaccgctcattctattttttctcctttctctcacagtctactaactatatgtacgctgtgatatggaataagattaaacaaaacggcaaaaagaatccggctgctgccagccggaaagggagggaaatacggatgtcatagtgttttcgttacattttgatcagagtattgagagcttgaagattgagatgtgctggattgattcatttgcaggaccatccctgtatttcccccacctgagccgtagacggtttttgatacggttaaaggacttatcgaaaacgcaccgccgacattgacaaccccgtttccggaaagactattaatcgtaataggaaaaccagccatcatatacggtctcctttctattaatctatttactatatgtacgctgtgtgttagaaataggagtaaacaaagcggtaaaaacttgtgaatcaaaaaaactgccggacatccggcagttttttagtctacttttcaaacggcacccagccgcctgtattctgaatcatttcccataacggttcaggaagtcggtatttctcaatttcagatgcttgaatggctttttcgatttcctgttcgcggccttctttgaccagcaccgcccattcggggttaatcaaaatgacacgtcccagagccaccagcggaattccgctttctaatacagcaagcgcttcgtccgcggtatagatggaaccgacggccatcagcggcactttatggccgacgcgttcgtttaataaatccatccgcgtccgtgaagtatccgccccgcggcgggctttggaattgacatccatcagtgaaatatgcagataatccaagttctcttctgcaagcgcgtcggcgagcatgaatgtttctttcattgtaagccccggtgtttccggctcttccggtgacaggcggtagccgagaacgaatggattttcagcgtgtgtatcaattgcctgtttgacagcgtcaacgactgcaagcgggaacgcaaggcgcttttcatcgcttccgccccagcggtctgtgcgccggtttgttttcggtgaataaaattggtgaatcaggtacccgtttgccccgtgaatttcaacaccgtcaaagccggcttcaatcgctctgcgtgtcgcttcgccgaatgctttcacgatgtgctcaatttcttgttcggtgagagcccgggacgtttgtctcccgtcttcttctgagccgctcgggctgacgacgtcgttgtttggcacgagttcaggagggcattccaatcctccgtggtgaatctgcacaacggctttcgctccttgagactggatcgcctgagcgagttttttcaagccgggaatgtgagaatcatcatagatgccgggctggcctggaaacgctttgccgtccggcgttacgtttgcacatgccgtaatgaccatgcccatttcttttgaacggggagtaatgtagtttaattcacggtcggaaatcgttccgtcatcatttgatgaatagtgtgtcatcggtgcgactgaaatacggtttggtatagtgacgccgctttcgaacgtaaaaggttcaaacagcggtttataagtttgcttcatcatttcgccttcttccttaggagtttaactcgtccgtattctagcttatgttttaattgtgtgcaattattttgcttgttcttcttcctgaggttatgatcggctgaaccatttaaacgaatgaaacggttttctccgttccttttcaggatctttatatcctcctgaaatttgatggccgatcgagctgaatatgacagcggcggcgaagaggagaatgatttttttcatatacatatcttctttcttatcttttacaaggttatttataagcatacgcttgtgcgaaaaaaccgtcaatttgtttttatttattcttttttccactttcctgcggcgaatatcgttccgatctgaatcacaacacttaacagagcgcacactgccacaactgtgttgctgtccatagaagacaccctcctttttgttaggttgatgtatcatatgacagctgtctctgttttgacaaaaccgtaatgcggtgtttcatatttttcaacacaaaaagggcgcttttttaagcgcctttacttttttttcagccggttcaaagcgatttgaacggcgatggcgtcatccaggtagccgatcggaaacatgtaatccggaatgacgtcggtcgctaaaatataatacagcagcgcgctcccgagaatcgcgcggtcttcagccggtgttgattcatccatatactgatgatgcatgtttttcaaatgatcaataaaagggccgacgctttcttcattgtccattttcttttgaaactcatcgcaaatcaggcgatggccctgctgggttttggcatattgttcatatctggtcagttcgcgctcaatttgctcccgggaaaaaggctgatcaaacatctcggccatattcagcatatcctgaatcgcgtgcatcgggtcttgcggcgcagcttctttttcatggccgatgtctatgcctgacgcctcaagcaattcctccagcggggtgcggagatgttttgaaaattcctgaagatgctttaaattggccttctgcttgccgtttataatccgggagatggtggccgtatcaatgtttgttaaggcgccgagttttctcatggagagcgagtgcttatcaagcagtgattttaaaaggggccccagtgtcgtatttttattttctgtcaagggtgtcacctcgtttccgccggaatgatgatcattaatcaataatttttgcagaaaaggtaccttttctgtgctgctgaataggatagtgtagattcaacggcacaacatgttgaaaagacatcaaagaatggagagaaacgaacatggcttggttattgattttaggtttggcagtgtcctcgagcattgataatttaggagtggggatgtcatacggcatcagaaaaatcaaaatatcgcatgcgtcaaatatgatgatcgcttttatctgttttgtattcagttatatcggaatttatttcggcaaatggatttcagccgttttaccgggctttcttcctgtattgctggcggcatttattttatctgtcatcggtatccgcatcattctgctgactgtgccgagaaaaacagcgcgtgttggcgcgtcagaaaaaaaaggccgttttgccggtctgctgcaaaatccggaggcagcggatgccgacggttcgggagaaatcggtatattggaatccatggttctcggggtggccgtatccgcaaatgcgctgaccaacggattaagcgcggggttgatcgggctttctcccgctgccatttccatcactgcggcggtcggaagctttttgaccatatggatcggctgctcgcttggaaaaaaagccgcgtcattgcgcatcggttcttttcacgtcggacagttcagcacggtgctgagcggagtgattattctcatcattgccgccaatacgctgctcttttaagttgtcccgttcattttatgaaaagctcaaaataaatatgaatgtttctattcgggagagcgcatgacgcggctctctttttttgccgatctgatattttttcaaaatgaacagaaagtcgtccgtttccgttaaattctgcatattcagccttcagacagaacctttttcatagactgatcagcttgttttctttctaagttcaggtaaacagcaggtcagatagccttcattccaaatatggaaaagcgctggaggaatgaaggctccctttacaaatcggccattctgttaaaagataaagccgaatgagaaaacgtgaggtgatctgtgtgaagtctgtcatacttctgatcttcaccgcatggctgttatcaggctgcgagtataccgcggaggctgatgcggcgccgtcatttactcaggaaggaacatttataaaaacggccggaaacgatacgatcgcggtcgaaattgacggagaaaggcaagaggtgaaggtgcctttcgctaagcggtttgaatgtcagtctctgcctgaacatacggcggtgcaaatcacctataaaaaagagagcaacggacaattacggcttgaggaactgaaaaaagaaacagatatgtgaaaacggggaggaaaaaaacgtgggtttactgacaaaaagcgctgctgccttcggtgccgctcttcttctgcttgcgccgtctgcttatgcagctgaacctttgcaagggaaaaccatttatatcgatgccggacatggcggagaagacagcggggccggcggaaatggactgcttgagaaaaacatcaatttagcggtgtcaaacaaggtaatcgccaaattggagacagaaggcgcaaaacctgttgcttcaaggactgacgatacttttttacggttggacgagcgggtggcgaaagcaagcgccagccaatccgatttattcgtcagcctccatacgaattcagccgtatcaacggcatcgggcacggaaacgtattttaattcgacatatgaaggagcagacagcgaaaggcttgcttccgacatccagcagcagcttgtcacgtctttagggatgagggacagaggcgtaaaagaagctcctttttatgttattacatattcaaagatgccgagtgtgctggctgaattaggttttatcacaaatcctcaagatgcggacaagctgaaaagcgataacggacaagagcacgccgcggacgccgttgtaaacggaatcgaaacctattacagcggacggtaattataaaatatgtgtaaatagcaccctccttatgtgcataacgattataatagagaaaaccgatgacaaacacctgaggtgacacatatgacgaatatttttgcccaccggggggcgtcgggcgactgccctgaaaatacgatgcccgcattcaaaaaagcgattgaggacggggctgacggaatcgaacttgatgtacagatgacaaaagacggccggatcgtggtcattcacgatgaaaccctcgaccgcacgacgtctttgaaaggatttgtgaaagatacggcgtatgacaaaatcagaaccgccgatgccgccggaaaatggaaagatgcttttaaaggtgtcagaattccgcttttgtcagatgtgctgcgttttgcggaacgtgctgattttctgataaacattgagctgaaaaacagtgtattccgttacgaaggaatggaagaagaagtgattaaaaaagtcagatattacggactggaaaagcgcgttattttttcttcatttaatcatgagagtctcgcggtttgccacgccttggcgcctgaaattgaacgggcggtgctgacaatggatgtgctgtaccggcctgaacggtatcttgccgccattcccgcttcaggttatcatccgaagctcggtacgccggcggtgagcgctgaagtgatcaaacatcttgcaaaacaccaagcggcgctccgtccgttcaccgtcaatcgtcccgaggatatgaagcagctgatgaaagcgggagcagacgcaatttttaccgattatccaaagctggccgtttctataaaaaaagaatgccgcagctgagaagactgttcagacagtcttctttttttatgggcgggaaaaaggcggtgcactcataactcggtcagccggttcatatattgtaacagggcgttttgtgtaagcgttatcttttatcttattgaaagtgaggcaaaattgtgggaaaaacggttatcgtcagtgcggcaagaacgccgttcggaaaatttggcggcgcattaaaagaggtaaaggcagccgagcttggcggcattgccataaaagaagcaatcaagcgcgccgctatcagtgaaagcgaagcggaaggagcggtgatgggaatggtcgtccaggcgagtgccgggcagataccggcacggcaggctgcaagatatgccgggcttccgtggtccgttccggctgaaaccattaataaggtctgtgcatcggggctcagggccgttaccatctgtgatcaaatgatccgggcgaaagatgcggacgtgctgattgcaggcggaatggaaagcatgagcaacattccgtacgccattccggccggccgctggggtgtgaggatgggggacggggtgtttcaggatttaatggttcatgacgggctgacctgtgcgttcgaccaggtgcatatggctgtccacggaagcactgcggccaaaaagtacggcatttcccggaatgaacaggatcattacgctcttttgagtcagaaacgcgcggctgaggcggccgaggcgggcaaattgcgtgaagaaattgtccccgtcacctggaccggcaaaaagggcaaacagcataccgttgaagcggatgaggggctgcgccctgatacgagccttgagcagcttgcagcgctcaagccaatttttacagccgacggaacggttacagccggaaacgctcccggtgtaaatgacggggccggagcatttgtgctgatgtcagaggaaaaagccgcgaagcagcatgtcaggccgctcgcagcgatacttggctttgcgtccgtcggactggaagcgtccgagctggcaagcgcgccgggagaggccatcagccggctcttgacaaaaaccggactgtccgttgatgatattgatttgtttgaagtaaatgaagcatttgcgtccgtcgtgctcgtgagtgaaaaaatagccggggtcagccgggaaaaagtgaatgtaaacggaggggcaatcgcgttcggccacccgatcggcgcaagcggagcgagaatcatcatgagtttaatatacgaattaaagcgtcgcggaggaggtttaggcatagcggctatatgcagcggagcggctcaaggagatgccgtcctgcttgaggtgtactgatcaaaaggagggagcgacagatgaagatgaaaacaatcatggtcgcaggtgctggtcagatgggagcaggcatcgcgcagacggctgcagaagccgggtttgccgtcatgttatacgattgggagccggaaacggtaacaaaaggtcttcaccggataaagacaaacctggagaaagagcaggcaaaaggacggaagtcacggcaggagacagatgccgttttcagccgtatttccccggcagaactcacagaagcgggagatgctgattttgtaattgaagccattgccgaaaacaaaaaagcaaaagcagaattgtttgacacactagataaaatctgtccccctcatgccgtattggcaagcaatacgtcttctcttcccattacggagcttgccgcggcaacaaaaaggcctgaaaaagtaatcggcatgcattttatgaatccggttcctgtcatggagcttgtcgaagtcatcagaggactcgccacatcggaagaaacggcggaaacagtaaagaagcttgccgtccggatgaataaaacccctgtcgaagtcaatgacttcccgggctttatatctaatcgcatattaatgccgatgattaacgaagccgtttattgcctttacgaaggagcagcttcaaaggaagcgattgatgaggtgatgaagctcggcatgcgtcatccgatgggtcctttaacattagctgacttcatcgggctggatacgtgcctttccattatggaggttctctatgcggggctcggagattcgaaataccgcccatgccctctgctcagaaaatatgtcagcgccggctggcttggcaaaaaaagcgggcgcggtttttatgagtacggcagatgacgtaaagatcatgaggggagacggcagccatgcattttacagaagagcacatcatgatgagaaaaatggtgcgtgattttgcccgcaaggaaatcgcgccgatggttgagttcatggaatcaacagatgaatttccggagcggctgattaaaaaaatgggcgaagcgggattgatgggcattcccgtcccggaagcttacggcggggcgggtgctgatacaacatcttacattttagcgattcatgaaatatcaaaagtcagcgcggccgtcggcgtcattttgtccgtccacacatcggtagggacaatcccgattttgcatttcgggacagaagcccaaaaacaaacgtatattccgaagctggcagcgggcgaatatattggggcttttgcgcttactgagcctcaatccggatctgatgcgggaagcctgaaaacaacggccgtgcgaaaaggcggttcatatattctgaacggttcaaaaatctttattacaaacggcggagcggcagatctgtatctgacattcgccataaccgatccgggtaaggggagaaagggaatttccgcgtttatcattgagaaaaacacacccggtttttctatcggaaaaaaagaaaaaaagctcggactgttaggttccaatactgtcgaattgcagtttgaccaagcggaaattccggttgaaaaccggctcggcgaagagggtgaaggcttttcaatcgccatgaaaaaccttgacgtcggacggatcggcatagcggcccaggcgctcgggattatcgaagcggcgctcggctgctcggtggagtacgccaaaacccgcagccagttcggcagacccattgcttcgaatcaggccgtttcatttaaattatctgacatggcgacgaatgcggaagctgccaaattattggtctatcatgctgctgatctgtatcagcgagggcttccgtgcggaaaagaagcatctatggcgaagcaattcgcgtccgatgcggcgatgaaagcggcggtggaggctgtgcagattcacggcggctacggctatatgaaagagtatcccgcggagcgtttatttcgggatgcgaaagtcacgcaaatctatgaaggaaccaatgagattcaaaggctgattatttctaagtatcttcttcaataaaaagtgcgcaaaggagcgaaaccatggaatcttattctcccggtttagatggcgtcattgcggtggaaacggggatttctttcctggatacacagcagggcagtattttaatcaaaggccacgatctgattgagctttctaaaacggccggctatatggacattgttcatctcttattggaagacagacttcctgatgcgaaagagaaggcggcgcttgaagaagacgttcggcgcggcgggcaccttcccgaggaaatcttgcacatatgccgtctgctgcctgaacatactcacccgatggacggactgaggacgggtttgtccgcgcttggaggctttgacaaggacatcgatgaccgttcatcttccgtaaatcagcaccgcgtacgcggacttataggcaaaatgccgaatctgacggtcaacagctatcgagtcatcaacgggctggagcctttggcgccggtcggaaccttatcatacagcgcaaactttttatatatgattaccggaaaaacaccgtcatctttggaagaagaaatcttcgaccggtcgcttcttttatacagtgagcatgaattgccgaactcaacgtttacggcccgtgtcatcgcttcgacgcaatcggatatttacggcgcgctgaccggagccgtcgcctcgcttaagggaaatcttcacggcggagcgaacgaagcggttatgtacatgcttgaggaagcgaaggatacagacgggtttatacaattattaactcaaaaactcgcaaacaaagaaaaaatcatgggcttcggccaccgtgtctacatgaaaaaaatggacccgagggcgctcatgatgaaagaagcgttaaaaaagctgtctgatctttcaggtgatttccgtctttatcatatgtgtgaagccggcgaaaccgtcatgcgggagaaaaaaggcctttatccgaatttagattactacgcagcgccggtctattacatactcggcatcccgataccgctgtacacgcctatattcttcagcgcgcggacggtcggcctgtgtgcccacgtcattgaacagcacagccgaaaccggcttttccgcccgcgtgtccgctataccggagcgcgcctgtaaacagatgagaaaggaagatgaaaacatgacagaaccccgccgaatggatgctgtaatcgaagagatttctgattacgtgctccatcaggagattgacagttcagaagcttttactacggcaggacatgtgcttcttgatacgataggctgcgggattttggcgctcagctatcccgaatgtacaaagctgctcggcccgattgtcccgggaacctccgtgcccaacggcagcagagtcccgggcacgccttttgttttagacccggtcacggctgcttttaatatcggctgtatcaacaggtggctcgattataatgatacgtggcttgctgcggaatggggtcatccgtctgataatctcggaggcatattggcttgtgcggattatatatccagagtgcggatttcagaagggaaagaaccgcttaccgtgcgtgatgtgctttgcgcaatgatcaaagcgcacgaaattcaaggaattctcgctttggaaaacagcttaaacagagtggggcttgaccatgtgctgtttgtgaaagtggcgactgcggctgtttgcgcacaaatgctgggcggctcaagagaggaaatcaataacgccgtatctcacgcttggattgataattcaagcctcagaacgtatcgtcatgcgccgaacaccggatcacgcaaatcatgggcggccggcgacgcgacgagcagaggcgtatacttggcccttatggcgcaaaaaggtgaaatggggtacccgacggctctgaccgcatctggatggggatttcaagacgtattgtttaaccggcaggaaatgaagcttgcccgcccgcttgggtcctatgtgatggagaatgttttgtttaaagtatcctacccggctgaattccacgcccagacagcggcggaatgcgcggtccggcttcatccggaggtgaaagaccgcatcgaagacattgacaggatcacgattatgacccatgagtcggcaatccggattatcgataaaaaagggccgcttcacaatccggctgaccgggatcactgcctccagtatattacggcaatcgggctgcttttcggagatatcacggcggatcattatgaagaggaaacggcgtctgacccgcgaattgatacattgcggagcaaaatggaggtgacggaacacaaagcgtactcaaaagattacttagacccgaataagcgatccatctcaaatgccgtacaggtgcattttacagacggcacggctacgggacggattgaatgtgaatatccgctcgggcaccgattccgcagaaaagaagccgttccgaagattcttgccaagttttcaacaaacatcagcactcatttttcattgaagcagcagcggaaaatcgaagaggtctgtaaagatagcggccgaatgcagaagcttagcgttaatgaatttatggacttatttctcgtataaaataggagggtgacaaacatgacgtggatcgtcagcaagcagtcgtctcaagaggagcttgcagagcggttccgtacgctgatggcagcgccggatctattgcagattcccggcgctcacgatgccatggccgctcttatcgccaagaaaacgggtttttcggctctttatttatcaggcgcggcttacacggcgagcagagggcttcccgatttagggatcatcacgtcggcggaaatggctgaacgggttaaagatctggttcgctcgtctgatctgcccgtccttgtcgatattgacacgggtttcggaggcgtgctgaatgccgcccggacggcgaaagaaatgtatgaagcgcgcgcggccgccgtccagatggaggatcagcgcctgccgaaaaaatgcggacatctgaatgggaagcagctcgtgccgattgaagaaatggcgcaaaaaatccaagcggtcaagcgggccgcgccgactcttcttgttgttgcgagaacagacgccagacagcaggaaggattggagggggcattaaaaagggcgtccgcttatataaaagcgggtgctgacgctgtttttccggaagcgctccaatcagaaagtgaattcagagcgttttccaaacaaatcagtgtgccgattctcgcaaacatgactgaattcggaaaaacgccgtattacagtgctgatgaattttccgatatgggctgtcagatggtcatttacccggtcacgtcactcagaacggcggccaaggcttttgagcgtattttccgccttctgaaagaagaaggctcgcaaaaagaggggctttcggatatgcagacgagaaaagaactatatgaaacgatcgcttacgatgactatgaagaactggatcaatccattgccaaaacgatactgccggacgactgaaaaagccctttttttgcaagggctttttttacagcttttttttcctgaaccgcgggctgacttgattgcgtttccgatctctgtacagaataaatccggccagaacataaaggccgaacaaaaaaaacgccaatccggccgccccctgaagaaaaagggacggaaacgggaaaaacgcatgcccgaataatgcatctctcatcagcttaatgccgagcgccgcgacagcgccggggaggaccagaatcaaaagcgcaacaagccggctcatattcagaaaacccctttacgatatgttttcctttattgtccaatcgaaaaaatattttgtcaagagatcaaaacgtggtaacataggggttgtgcaaattattgcaacgggaaatacaggtgtgcaaattttttcatataaaggggtatcgggatgcagaaggtgctgattataggtgctggtaaaggaggcacggcgctcctacagattttgatgaaaacaaagctgatccggattattgcggtggttgatcaagatccggaggcgcaagggctgcaagaagcccggagatatggaattgcaacctcatcagattggaaaccctacataactgaagatatagatattatcatccatacaacaggcgataaagcggtcatggatgagctgctccatgagaaaaaagaacaaaccatcgtcatgccgggaaaattggcgtacatggtgtttcagctgatggaggaaaaacagcagcttatccaaatgctgaagtcgcagacgtataagcatgaccggatttttaattcaacgcacgacggcatgatttttatagacgtcaacgaaacgatcattttatttaatcagatggcagaaaaaatggtcggccaaaaacgggaggatgtcatcggccgccaaattaaagatgtagtgccgaacacaaagctgcctcggattctggaaacgagagagccggaatataaccagaagcagcttctcggaaagcacctgcagattgtcacgacaagactgccgatcattgatgaaggcggaaaacttctcggcgcgttatgcgtgtttaaagacatcaccgacgcagttgaactggcggaagaggtcacgaacttaaaacaaatccgcaccatgcttgaagcgattatacaatcatcagacgaggccatttctgtcgttgatgaaaacggcatcggaatgttaatcaacaaagcgtatacaaaaatgaccgggctgtcagaaagcgaagtcatcggaaaacccgcttccaccgatatctcagaaggggagagcatgcacctgaaagtattggggacaaggcggcccgtgcggggtgtgagaatgaaggtcggccccaataaaaaggatgttatcgtaaatgttgcccccgttattgtggacggtattttaaaaggcagcgtcggcgtcatccacgacgtgtcagaaattaaaacgctgactgctgagctgaatcgggcgcgccagattatccgcacgcttgaagcgaaatacacgtttgacgacattatcggcacgagtgaacaaatgctggtcgcccttgaacaggcgaagctcggggcgaaaacgccggcgacgattctgctgcggggagaatccggcacaggaaaagaactttttgcccacgccatccataatgaaagcgaccgaaaatacaataagttcattcgggtcaattgtgcggccctgtctgaatcactgctagaatccgagcttttcggctatgaggaaggcgcgtttacgggcgcgaggcgcgggggcaaaaaaggactttttgaggaagcgaataacggcagcattttcttagatgaaatcggagagctgacccaaagcacccaggcaaagctgctcagagttctgcaggaaaaagaaattatcagagtcggcggcgctaaagcgatttctgtcaatgtcagaattatcgcagcgacaaacgtcaacatcgaaaaggccatggcggaaggcgcgttccgtgaagacctgtattaccggattaaccgctatccgatctcaatcccgccgcttcggcagcgcaaagaagatattgaagcgctgagcattcggctcattgaaaaaatcaatcaggattacggccgcaatgtaaaggggctcacgccgaacgcgctgcgagctttatcagcctacagctggccgggaaacgtccgggagcttgaaaatgttctcggacgggcaatgatatttttagagccgcacatggaacggatcgaacagcagcacctgcctgtttttgaatcagagctgaatgaaaaaaacggcacccaaagtgattttccggatgtggaaggggaaaagctgtctcaggctgttgaaaaatttgaagcgcacgtcattcaaaaaacgcttgaaaagcataaattcaaccgaaccaaaacggcaaaagcgcttggtgtcagcattcggaatctgtactacaaaatggacaagtacggccttgcaaatgacggcatgcaataaattgcagagaaagcgcaaacagctgcatgctttcttgaaaaaagccggaataaaccctcacgcacatttggcacggaacttgcattgttaaaagcggattcgcacaaggaaggtggtacaaaatgaagctgagagacctagttgaaaaagccgcggcaaaaaacgcaaaaaccattgcagtggcccacgcagcagataaagaagtgatccaggccgtcaaaatggcggcagaacacttgtcggcacgatttttactgacgggtgacagcggaaagctgaaagagcttctggcaaatgagccgaagttcaatgctgaaatcatccacgccgattcacccgaagaatctgcggcaaaagcagtgcgcgcagtgcgtgaacaagaggcggacgttttaatgaaagggaatcttccgagctcaactcttctgaaatcggttttaaaccgccatgaagggcttcgttcaaaaagggtgttatcacatgtagccgtttttgaggtgccggactatgaccggctgatgtatgtgactgattcagcgctgaacattgccccgtctcttgaagagctcgggcatattctgcaaaatgcggttcatgtcgcacattcagtagggaatcctatgccgaaagccgcagtccttgccgctattgaaacggttaatccgaaaatggaggcgacgctgaacgcggctgcgatcgtccagatgtgcaatagaggacagattaccggctgcattgcggacggaccgcttgctttggataatgccgtatcccaagcggctgcgctgcaaaaagggatttccggaagcgtagcgggccaggcggatattctcttggttccttcaatcgaggccggaaatatgctttataagtcaatgatttattttgcgaaagcaaatgttgctgccgtcatcgccggtgcaaaagcgccgatcgcattaacgagcagagcggataccgcagaaaataaactgtattcaattgcgcttgcgatttgcgcatcacaagaacagtaggaggaacgaacctatggaaatttttaaatatatggagacttatgattacgaacaattggtattctgccaagatgaacaatccggattaaaagcgatcatcgcgattcatgatacgacgctcggccccgcactcggcggaacaagaatgtggacatatgacagtgaagaagcggcgattgaagatgcactaagactcgcaaaaggcatgacttataaaaatgcggctgccggtttaaacttaggcggcgggaaaaccgttattatcggagacccgcgcaaagataaaaatgaagaaatgttccgcgcgttcggccggtacatccaaggcttaaacggaaggtatattacggcggaagacgtcggcaccaccgttgaagatatggacatcattcatgatgaaacagactatgtaaccggaatttctccggcattcggttcatcaggaaatccgtccccggttacggcgtacggcgtctacaaagggatgaaagccgcagcgaaagcggcgtttggcactgattccctggaaggtaaaacaattgccgtgcaaggcgtgggaaatgtggcttacaatctatgccgccaccttcacgaagaaggcgcttctttaatcgtaacggatatcaataaagaatctgttaaacgtgccgttgaggacttcggcgcccgcgcagttgatcccggcgacatttactcacaggcgtgcgatatttatgccccatgtgctctcggcgccgtcattaatgatgacacgattaaacagctgaaggcgaaagtcattgcgggagcggccaataaccagctgaaagaaacacgtcacggcgataccattcatgaaatgggaatcgtgtacgctccggattatgtcatcaatgcaggcggcgtcatcaatgtggccgatgagctttacggctacaatgctgagcgggctttgaaaaaggttgaaggcatttatgcaaacattgagcgggtgctcgatatttccttgcgtgacggcattccgacatacttagcggctgaccgtctggctgaggaacgaattgagcgcatgcgccgttcaagaagccagtttctgcaaaacggccaaagtatattaagcagacgataggaatttgatctggaggtatgaaaatgttcgaaaaggaaaaacgcattctcattctgaatccaggctcaacatcaacgaaaatcggtgtctttcacaatgaacgctgtatctttgaaaagacgctgcggcatcccgaagaagagctgaaaacatttaacagcatcatcgaccaatacgaatttcgaaaaataagcattcttgagtctttgcacgaacagggcatcaacatttcaaagttcgatgccgtttgtgccaggggcggtctgctcagaccgattgagggcggcacatatgaagtgaatgacgccatgatcactgatttgaaaaacggctacaacggccagcatgcttctaatctgggcggaattattgccagggaaatagctgacggattaaatatccccgcgtatatcgtcgatccggtcgtggtggatgagatgactccgctcgctaaagtatcaggaatgcctgaaatcaagcggaaaagcattttccatgctttgaaccaaaaagctgttgcccgtcaggcggcggcgtccctcggcaaacggtatgaacagatgaagatgatcgtcactcatatgggcggcggcaccacagtcggtgtccatgattgcggacgggtgacggatgttaacaacgggcttcacggagaaggacccttcagcccggagcgcgcgggaaccgttccggcgggtgatttggtggaaatgtgtttttccggcaagtattcaaaagccgatatgatgaaaaaacttgtcggcacgggcggactctccggctacctggggacaacggacgcggtgaaggtggaaaaacgcattcaggccggagatgagcatgcgaggctcatttatgacgcaatggcttatcaagtagcaaaagaaatcggggcggcaagcgccgttttaaaaggaaaagtagacattatcgtcctgacgggcggattggcgtacgggaaaagtttcgtatccgccatcagatcgtacatagattggatttcggatgtactggtgtacccgggagaaaatgaactgcaatctctcgcgcaaggcgcgcttcgggttttagccggtgaggagcagtcaaagcaatatcagatcggcgaaggagtgaaaacaaatggcgactgagtatgatgtggtcattctgggcggcggcacgggcggttatgtagccgccatcagagcggcccagctcggcttaaaaacggccgttgtagaaaaagaaaagctcggcggaacatgcctgcataaaggatgtatcccgagtaaagcgctgttaagaagcgcggaagtgtaccgaaccgcaaaggaagcggcagcattcggcattgaaacggaaggtgtctccctccgctttgacagcgtgcaaaaacgaaagcagggaatcgttgaccggctggccggcggtgtcgcccacttgatgaaaaaggggaagattgatgtattcaacgggtacggacgtatgctcggaccttccatcttctcacctcttcccggtacggtttccgtcgaatacgcaaatggtgaagaaaacgacatgctgataccgaaacaattgattatcgcaaccggttcaaggccgaaaatgctgccgggtttagaagcagacggtacatatattctgacatcagatgaagcgttagagcttgaacgtctgccccaatccatgatgatcgtcggcggcggtgtcatcggaattgaatgggcatccatgctgaacgatttcggcgtcaatatcactgtgattgaatatgcggatcgcattttgccgacggaagaccgtgatatttcaagcgagatggaaaaactgttaacgaaaaaaggaattaagatcgtgacgggtgcgaaagtgcttccggatacattggaaaaagcggacggcgtttcaattgccgctgaaaagaatggaaaaaaagaaacgtatcacgcggaacaaatgcttgtttccatcggccgccagccgaacattgaagggatcggacttgaaaacacggatattgaagcggaaaacggttctatcatcgtgaacgaagccgggcagacgaaggaatcgcacatttatgcgatcggtgatgttgtcggcgggctgcagcttgcgcatgtggcctcccgtgagggcatcattgccgttgagcatatggcgggtcttaatccggctccgcttgatgccgctcttgtgccgaaatgtatttattcaaatccggaagcggcgagcgtcggtctgacagaagaggaagctcttcgaaaagggcatgaactgaagatcgggaagtttccgttcatggcgatcggaaaggctcttgtatacggagaaagcgacggctttgtcaaaatcgtcgctgatcggaatacagatgatattctcggtgttcatatgatcggcccgcacgtcaccgatatgatctctgaagcggggcttgccaaggtgctcgacgcgacgccttgggaaatcggccagtccatacatccgcatccgtcgctgtcagaagcgattggagaagctgcgttagccgcagacggaaacgcgattcatttttaaaaggaaagaaggaggggtttgaatgactacaaaccgccatcaagcattagggctctctgacgaagaagccgttgaaatgtatagaaccatgctgttagccagaaaaatcgacgaaagaatgtggctcttaaaccgctcgggcaaaattccgttcgttgtttcatgtcaaggacaggaagcggcgcaagtaggcgcggcctatgccttaaaccgtgataccgactatgtgcttccgtactacagagatataggggttgtgcttgcattcggtatgactgcaaaggatttgatgatgtcgggttttgcgaaagcagctgacccgaactcaggcggaaggcagatgccgggccacttcgggcaaaaggaaaacagaatcgtaacgggctcatcccctgttacgacgcaggttcctcacgcagtcggaatcgcgcttgcgggacgcatggataaaaaggatatcgtctctttcgttacctttggagaaggatcttccaaccagggggattttcacgaaggggcaaactttgccgccgtgtataaactgcctgtcattttcatgtgtgaaaacaataagtatgccatttctgtcccgtatgacaaacaggtggcgtgcgagaaaatatccgaccgggcggcaggctacggcatgccgggagtcactgttgacggaaacgacctgctggaagtttaccgggccgtaaaagaagcgcgcgaacgggcgtctaaaggcgaaggccctacattaatagaaacggtttcctaccgtttgacgccgcattccagtgatgacgacgacagcagctacagagaacgcgaagaagtagaagaagcgaagaaacaagatccgcttcttttatacaaagcatacttgcaagaagccgggcttctaggtgaagaagaagaaaagaccatgctggatgacatcatggctatcgtaaacgaagcgacagacgaagcggagaaagcgccatacgcatctcctgaatcaacgcttgatcacgtttatgcgaagtagggaggaatacttatgtctgtaatgtcttatattgacagtattaatgcagcaatgaaagaagaaatggaaagagatccgcgcgtttttgttctcggggaagacgtcgggagaaaaggcggcgtgtttaaagcaacggcgggtctctatgaacagttcggagaagagcgggtgatggatacgccgcttgctgaatcagcgattgccggtgtcggcatcggcgccgcgatgtacggcatgcgcccgattgccgagatgcagtttgccgatttcattctgcctgcggtcaaccaaatcatttcagaagcggcaaaaatacgctaccgttcaaacaatgattggagctgtccgatggtcatcagagcgccttacggcggcggtgtgcacggcgcgttgtatcattcccaatctgtggaggccatttttgccaaccagccgggccttaaaattgtcatgccttcaactccttatgacgcaaaaggactgttgaaagctgcagtccgtgacgaagatccggtgctgtttttcgaacataagagagcgtaccgtctgattaaaggcgaagtccctgcggatgattacgtccttccgatcggaaaggcggatgtaaaacgcgaaggcagcgacattactgttattacgtacggattatgcgtccattttgctctgcaggctgccgagcgccttgaaaaagatggaatttccgcacacgtattagatttgcgtacggtttatccgttagataaagaagccatcattgaagccgcgtctaaaacaggaaaagtattgctgatcacagaagatacgaaagaaggcggtattatgagcgaggtcgccgccattatttctgaaaactgcttatttgatttagacgcgccgatcaagcggcttgcaggtcctgacgttccggcaatgccttatgcgccgacaatggaaaaatacttcatgatgaatcctgacaaagcagaagccgcgatgagagaattagcggagttttaaagacgtaaggaggtttttgacatggcgattgaacaaatggctatgcctcagctcggagagagcgtgacggaagggacgattagcaagtggctggtatcccccggtgatcaagtgaataaatatgaccccatcgcggaggtcatgacggataaagtgaatgcggaggtgccgtcttcttttaccggtacgattacagaacttgtaggagaagaaggccagactcttgcggtcggcgagatcatctgcaaaattgaaacagaagaaacggaaaccgaagtggcgccgaagcgggaagaagagcagaatagcccttcagacactgatgcaaaccgtcaaggtaaagatcagtcaaataaagcgcgttattcgccggccgtgctcagattagcgggagaacacggcattcagcttgaaaaagttgaaggaacgggtgcaggcggaagaattacgcgaaaagatattcaaaagatcattgattcgggaatgaagcagaagtcggaagcaccggcgccggctgccgttcaaacaacgcaacaagcgccgaaacaacagcaaaaacaagcgccgcaacccgctctgtcagccggtgatattgaaattccggttacaggcgtcagaaaagccatcgccgccaatatgcataaaagcaaaacagaaattccgcatgcgtggacgatgatggaagtcgacgtcacgaacatgacggcgtacagaaacagcattaaagactcatttaaacagaaagaaggcttcaatttaacgtttttcgctttctttgtaaaagcggcggcgcaggctctcaaagagttcccgcagatgaacagcatgtgggcgggggacaaaatcgtccaaaagaaagacatcaacatctccattgccgttgccacggaagattcgctgtttgttccggttattaagcatgctgatgaaaaaacgattaaaggcatagccagagaaataacggatcttgcgaaaaaagtgagaaacggaaaacttaccgcggaagatatgcagggcggcacatttaccgtcaataacacgggatctttcggctcagttcaatctatgggcattatcaaccatccgcaggcggcgattcttcaggtagaatctatcgtcaaacgtccggttgtcatgaataacgggatgatcgccgttcgtgatatggttaatctttgcctgtctttagatcacagagtgctcgacgggctcgtgtgcggccgattcctcggacgcgtcaaagagatcttagaaaacattgatgaacatacttccgtctattaaaaaaactccttttgcccgggcggcaaaaggagcttttttattttcattgtgaatcctcgggaacaagcatagtgagatgatgttttttcacttcgatcgtacaaggtgttgttccgtatacctcgccatctgtatccgcgtccatctcacgtgcggtttcgatttcaatcctggatgcctgaatataggacagctcccctttgaaatcatcaaacgaaccctgctccatcgtcatcagctcccgcagcgcggcaaggcttgtgttgcggcagattaacacatcggctaagccgtcctggaggctggcatcaggcaggggaactctgtttgtcccgatataatgcccgttcatgacaagcaccattacggcttcgtcttctttcacctcgccgtcaatcgtcaatttgacaggaaacgggttcgcgcttgtcatcgtccgcaaggcgctcgtgaagtagctgattttaccaagccatgctttttcagtttcattaatatggcttgatgcttcggtgatcagtccgatgccccagaagttcagaaaatagccgtcatccgttttacagacgtcaatcatccgtttatgtccggccgcgagcgcttcagcggccttttgaaggttttgcggggtgccgagcgcccgtgagaaatcgttgcacgttcctcccggcaaaatgccgatagcgggtctgtgatcaagcttgctgatgctgttgatacattgatgcacagtgccgtctccgcctaaaatatataaatggtcaactgaactgtcgagattttcacaatactgacgggcatcatcctgatgtttggtcggtttaatcaaaagttcatcagctgactgggccaaaatggggacgaccgtgccgagcgttttatcaatttgtttttgaccggcgtttccgttataaattaaaactgctttccgttggctcatatgactgctcctttatttcagacaatctccttaacaagtttcccgtttttaaagggtcataaacttacatcgggaacataaaagggacaaaaaacaattggatatgagcggtgtcatttgccgatagggaggttccttgctatcataagaagagatgatcaaaaaggagatgtcccagttgaatatggattttaatttatttatgaatgatgtcgtgcgtcaagcccgccaggaaatcacggccgccgggtatacagagctgaaaaccgctgaggaagtggacgatgcgctttcgaaaaaaggaacgacactcgtcatggtcaactctgtgtgcggatgcgcaggcggtattgcacggcctgccgcgtaccattccgtacattacgataaacgcccggatcagcttgtgacggtatttgccggacaggataaagaagcgacagccaaagcgagagaatactttgaaggctatccgccgtcctctccgtcatttgccattttaaaagacgggaaaatcatgaaaatggtggaacgccatgaaattgaaggccatgagccgatggccgtcgtcacaaaactgcaggaagcatttgaagaatattgtgaagaagtataagtgaaagaaaaaccccggagccaagcgggactgacccccgtttttgagacagggatcaaaacacctttaagcagccagctgtcggtatgtgaccggcggctggttgtttagtttcgtttgaatacgaatgttgttataatagtatatataggtttcgacagtttgctctacgatggtcgtcgtagtgctttccaacctgtcgaggtagaacgtttcagactttagtgaggaatgaaacgattcgatggaggcattatcagcgggtgtccctttacgggacatgctcatggtaatgccttttgttttaacagctttctgatactcataagatgtataaacagaaccttggtcactatgtaacacgcagttctctggcagtacgggcagctgatcaagtgtgtgtaagacaaaatctgtgtcctgtctatcgccaatcgtaaaagcaatcacttctccattgtataaatccaatatactggaaagatacaattgtttctgcccataaggcaaatatgtgatatccgttactagcttttccagagggcgatcagactgaaagttccgatctaatatattctcggccacggcatatggctgcccattcttcttgcgctttttcaccttaacccggcattgccactgatttttctgcataatgcgctgaaccgttttatgattaatacgcattcccttttttaatatggctgtgattttccgatagccatatcgatacttgtgttctcggcacaacgtgccgatttgtttttctaaatggtatttagggttatctttcatcagattcttcttccaacgataataagatgctcgtgagatacctaaatgaatacagatatcctttatgatcattgtgctgcgcaatgcttctacaagctcgactggcgtttcgctatcagcttcctttccaattcgttgtacttttttaacacttcattctgttgtctcagataacgattttctgcctgcagtttctctaattcggaagaatactctggaccttttccataagaatattgctttccgacaggttgttcgaatcgatgtgtgtccccagctttataccacctgacccatgtctgcacctgcgtcttattctttatattcaattcctgcatgatctccttcacaggcacgcccgccaatctcatttctacagccttctgtttgacttcaaccggataactcactcttgccctcatagaaaaacacctccaagtctaatttcggataacaacgatccgttttcaaacttgaaggtgttttttgtttgtctcatattatggggtcagtcccaagcgcttgcggggtttttttatatggcatctgtataaatataaatatttatacatcggcgttcagctgtcactaacttgaaaaacaatgactataataaacacagaaaggaaaatatatttttcaaaaatagtattgcatcacaattaaaaagtgtttaaaatacaagttaacgaataaatattcaattttaagagatcagtagatatgggggaaatgaatcatgaagaaatggctgttggtattagctgccgcatgtatcacctttgcgctgtccgcctgcggatcaggcaattcaggctcagagggcggaaagaacaagctgattatgggtacatcggctgactataaaccatttgaatataaagacggcgatcagatcaccgggtttgacgttgatctggcaaaagctctgggcaaaaagaccggctatgacgttgaggtgcaggacatggacttcaacagcctgattacagccttgaagtccaagcaggtagatatgattttatctggaatgacacctacgccggaacggaaaaagcaagttgatttttctgatatttattatactgctaacaatatgatcgttacgaaaaagggaagcagcatgaaatccctgaatgatctgaaaggcaaaaccgtcggtgttcagctcggctccattcaagaagaaaaaggcaagaagctcgcttcgaaatacggttttcagctcgaagaccgcaaccggatctcagacttgaccgaagagatcaaatccgggcgttttgatgccgcgattatcgaagacatcgtagcacaaggctatttcagttcaaatcaagatctgcagggctttgcgtcagcagatgcgaaatcagacgaatcgggttccgcgattgcgttccgcaaagacagtgatctgacagcgaagttcaacaaagcgctgaaagaaatggagaaaaacggagaaatcgaaaaactgaagaaaaaatggttcaccaacgagaaataaaagaaagctcaacttttcgttgagctttttatcttgaataaagacaaaggagatcacacttatgaatttggatttctcagcgacaatcccccaaattccttttatattggaaggccttgcggtcacattgaaaattgtgctcgtttcggcggtcatcggtcttgtattaggcatcgtgctcagcttatttaaaatcagcacgatcagtccgctgaaatggattgcggatttttatacttcgatattccgcggcacgccgctcgtgctgcagctgatgatcatttatttcggtatgccgcagcttctgggctttcagatcgatcaattttgggcggcggtcaccgcattatcgctcaattcagccgcttacgtctctgaaattatcagagcgggaatcaacgcaattgacaaaggacaaaaagaggctgccgtcgctctcggcgtgccgtacggaaaaatgatgaaagatctgctgctgccgcaggcgtttaaaaacatttctccggctattattaacgaattaatcaccttaacgaaagaatcggcgatcgtcacagtcatcggtcttggcgacattatgagacgggcctaccagtccggcgccgcaacatacaactatttagaacctcttattgtggcgggcttaatctattacgtgctcgttttgatcttagcattcatcggaaaaggcgtagaaaggaagctgaaagccaatgattaaggtcgacaacctgtcaaaatcattcgggaaacatgaagtactgaaaaacatttcaacacagatcgaagaaggggaagtcgtcgctgtcatcggcccttccggttccggcaaatcaacgtttctgcgctgcttaaatctgctggaaaccccgagcggcggaacgattgccattaaagaaaatgaaattaccgcagctaaaacgaataaactgaaagtgcgggaaaatatcggcatggtatttcagcattttcatttgtttcctcataaaacggtgcttgaaaatatcacatacgcgccggtcagcgtgaagaaagagtctaaaaacgaggcggaggaaaaggcgtgcgccctccttgaaaaagtcggactgcttgacaaacggaacgactatccgaaccgtttgtcaggcggacagaagcagcgggtcgccatcgcgcgggcgcttgccatgaatcctgacatcatgctgtttgatgaaccgacctcggctcttgacccggaaatggtcaaagaagttcttgaggtgatgaaagagctcgcgcagacgggcatgacgatggtgatcgtaacgcacgaaatgggatttgccaaagaagtggcagaccgcgtattatttatggatgaagggacgatcgtggaagacgggcagccggaagaattttttctttctccgaagtcaaaaagagcacaggactttttagaaaaaatattataaaatataactggaagaaaagaagaagaatgctcttcttcttttttttgagaaagaaacaaacagaatggagcaagcaatgtttaaaatcggttaccgcacactaaagaccgcacttggaacggcgctggccatttatttagcccagctgttgcatctgcaaaacttcgcatccgcaggaatcatcaccatattgtgcatccagattacgcaaaagcggtcgcttcaggcctcgtgggcccgatttgccgcctgtttattggcgatcgtcttctcatatgtctttttcgggctgatcggctattatccgtttgcgatcggaatattgctggtgctgttcattccgactacagtcgttttaaaaataaacgaagggatcgtcaccagctcagtaatcattcttcatttatatatgtccggcggcattacgatggcgtttatctggaatgagttccagctgatcaccgtaggtatcggcgtcgcgctgttaatgaatctgtatatgccgagcctcgacagaaaactcgcggcgtaccggaaaaaaattgaggacaacttttccgtcatcttcgccgaaatcgaacggtatttgttaactggtgagcaagattggtcggggaaggaaataccggagacgcatcagatgattcaagaggcgaaaaacctcgcctatcgggacgtgcagaatcatattttgcgccatgaaaatctttactatcattattttaagatgagacagaaacaatttgaaatcattgaacggctgctgccgaagattacctctatttcaataacggtggagcagggcaaaataatcgcccatttcatccatgaattaagggaagccattcaccccggcaataccgctcataaatttttaaaaagacttgcagaaatgagaacggaatttgaagaaatgccgctcccggcaacgcgcgaggagtttgaagcgcgggcggctttgttccacctcctcggtgagatggaacaatatctcgtgattaaaagttatttcaaaggcatcaagctgtaaaaaacatatggatcaatcgcatgagtcctcctttcattggtcattctaatgaaaaaaaggagaggagcccatgcgattttttttattgtcagccgccctgctgctgtctccgctttggccgcttggcgcgaaccctttgccgggtgacccttatattatcgtcaataaagccacaaatgcgcttgctgttgtgaaggataaccgaatagaaggcatttatcaggtggcgacgggaaaaacggatgatttgacgcctgaaggagaatttacggtaacggtcaaagccgtcaatccgtattaccggaagaaaaatgtaaagggaggcgcgccggaaaacccgctcggcgtccgctggatcggttttgacgcgaaaggaaccgacggcaggatatacggcattcacggaacaaacagagaagagctgatcggggggtttgtatcaaacggctgcatccgtatgaaaaaccgggatgtcatccgtattttccggattatccctcccggaacgaaagtattgattacaaaagaaaaccgctcattcgaggacattgcaatagagcggaaagccctcataaaaaagcaggaaacccccttgcaatgaggcgcctgcttttttaccgcaaatacatcataatgcctgagaggagggttgaaagtataaatacgcccaaaatgacgataacggcgcttttcataaatttttgagacattgtttcactccttaagattactgtctatcattttaacgtgttttgcttgtatgaacaagccatatcctatggcggaaagcaggtggccgcgctatgaaaaaacttgatcatgtcggcattgccgtcagctctattgaagctgcgagaggattttacgaacggatgctcgggcttacgtatatgggagacgagctggtaagcggccaaaatgtgagagttgcttttttagaggcgggaggcacaaagcttgagctgattgagccgctgtcggacgcgtctcccgtcagctcttttttacagaaaagaggcgaaggactgcatcatttggcattccgctgcgccgatatgaaggaaacgatcaaggagcttgaagcatgccgcatgactttgatccatcatgaaccgcaatacggagcgggcgggaagaagatcgcatttctctctccaaaagaggcgaatggggtcctgattgagctttgtgaaacaattgaaaaaggagaaactgaagatgagcatgagtgatcatatcagacacttaaatgaaagacgttcctttttaacaaacggcggcggagcggaaaaaaatgaaaaacagcacaaaaaaggcaagctgacggcaagagaaagaattgactatttattggacgaagacagtttttcagagctgcagccgtttgccaaaagccgcatgcccgggtcccgaaatgctccgggagacggcgttgttaccggatacggcacaattgacggacggcccgtgtatttgtttgcccatgactttaccgtactcggcgggacgctcggcgagacacatgcggaaaaaatcgcggcggtaatggatctggcggcgaaaaataaaactccgatcatcgggctgaacgactcaggtggtgcgagaattcaagagggtgtggtatcattaaatggatacggtcatatctttaggcgcaacgtcctttactcgggagtgattccgcaaatctctgtcatccttgggccgtgtgccggcggtgctgtttattcacccgcattgacggattttgtgattatggcggagcatacgtcgcacatgtttattacaggcccgaaagtcattgaacaggtgacgggtgaacagattgacgcggaaagtttaggcggtgcgggaatacataatgtgataagcggaaatgcccactattccgcacgaacggaaaaagaggctctttccgctgtgaaaaccctgctttcttatctcccgcacggcggacagacggcatcacccgttaaaaaggaagacgccagaccgttattaaacaccctcgttcccgcggacagttcgaaaccttacgatgtgttacaggtaataaaagagctggcggatgacggaacgttttttgacattcagccgtattttggcaaaaacattgttgtcggttttctgaaactcggacggcgtacagtcggtgttgtcgcaaaccagccgaaacacttggcggggagcctcacgattgatgcagctgacaaagcgtcgagattcatccgtttttgtgacgcgtttcatattccgctattgacgatcgctgatgttccgggatttcttccgggctttcagcaggaacatgcgggaatcatccgtcacggagcaaaattgctgtatgcttttgccgaagcgacggtgccgaaagtgacgctcatcatcagaaaagcttacggaggcgcctatgtcgccatgaattcgaaagggctcggggcagatcttgtattcgcctggcccaatgcggaaatcgccgtgatgggagcggaaggcgcggcgtcgattttatacagcagagacatacaggcttctggcgacccggagaaaacgaagcgcgaaaaaaaagccatatacgaaaaggaaaacgccggtccgtataaagcggctgcctgcggtatggtggatgatatcatccggccggaagactcgaggaaaaaattgattcaggcatttgacatgcttgcgcataaggaagaggaaagaccgaaaaaaaagcacggtaatataccgctttaaacggagggaactgaaaatggtaaacgaaaaacgtctgcttgaagaatttcttgaactcgttcaaattgattcagagacaaaacatgaagcggaaatcagcaaagtgctcaaacaaaaattcactgatttaggattgagcgtaaaagaagatgatacaaaagaagtgaccgggcatggagccggcaacttaatctgtacgttaaagggcacaaaagatgcggatacgatttatttcacatcccacatggacacggttgtcccgggcaaaggcgttaagccgattgtggaagacggctatgtaaaatccgacggcacgacgattctcggcgctgatgataagacgggtcttgccgcaatgtttgaagccattaaagtgctgaaagaacaaaacatcgagcacggcaccattgaattcattatcacggccggagaagaatcgggattagtcggggcaaaagcaatggatcgttcagacattaccgcgaaatacggttttgcgcttgattcagacggaaaagtcggcaacattattgtagccgcaccgacacaagcgaaagtgagagcaaccattttcgggaaaacggctcatgcgggagtagaaccggaaaaaggcatctccgcgattacaatcgcatcaaaagcaatctctaaaatgccgctcggccgtattgataaagaaacaacggctaatatcggacgtttcgaaggcggcacgcaaaccaatatcgtctgcgaccaggttgatattctggctgaagcgcgttcattagtgcctgaaaaaatggaagcgcaagtgcagaaaatgaaagaagctttcgaatctgctgcagctgagatgggaggccgcgcggaagtggacatcgcggtcatgtatccgggtttcaaatatcaggacggcgatcaggttgtggaagtcgcgaaaaaagcggcggcaaaaatcggccggccgagcgaacttcagacaagcggcggcggaagtgacgcaaacgtcattgccggccacggcattccgacagtcaacctgtcagttggctatgaacaaatccatacgaaaaatgaaaaaatgccgattgaagagctcgtcaaaacggcggaaatggtcgttgccattatcgaaacagcggccaactaaaaacgaagcacccagttgattgggtgcttttctcattcttcatgataattggcgtaaagcttcgcagatacaagaaaaaaccctgccggataggttccggcagggtttcagtattatgatttggcgggctccgcctgagccgcagcctgtttctttttatgatgcgtctgctgtaaaagtacgttctgcactgtcaaaaacagtccgcttgtaaaccagtaaagcggcagcgcagccggtacgttaagcgaaaaaacggtcatcatgacagggaaaataaagaccatgatttttgctgactgcatcgcggccggattttgagcagccggtgaatatttctcgtttaatttttgggaaatataagcctgtaagaaatacatgccccccgcgcacagtgatacaagaatatcagaatgccctaagctgaaccacagaaatgagtgtgaagcaatttccggcgttgagcggatggcgtaataaaaaccgatcaaaatcgggaattgcaccagcatcggaagacatcccattgccatcggattcagattgtgctcacggtaaagcttcatcatttccatttgcagttctttttgtttttccgcatctttcgtttgttttattttagcctggatgctgtcgacctgcggtttgatcacagccattttttcctggaacacccgctgtttcttaaattggttcacaaacaaaggcaatacaacgatccggacgataatcgtcaccagaataatcgacagtccgtactcaccgtggaacaggcccgccaccccttttaaaagtgccgaaaacggctcgatcaggtaatcgtggaaaaaaccgatattcccgaggcctcccgtctgagtctgagatgtcgccgcaaaagccgagcggcctgtgcacagtacgataaaaaacaatccgaatgcaatccatttttgatatgttttagacaattatgtttcctcctttttatcttcacttgccgttataaaaggaggaagctgacatcttcatcatcattcgccggtgaattcatgcggatgactttacgtatccaagttgtaatgcgatgatatataataataagaaagtctgttcggttcagctgaacgactgcttgatgttcatctattcgtttcgttctccaatgctcgcctgcgcggcgctcacgcaaaagaaaagcgatgccgatcgcggtcagagcgggaagaataattgtgaaaaaatcgactaaaaataaaaagtcattcattgactcaagaatcattttatcacatccattcagctcttattttactacatatatataaggttgtctatgaaaggaaaggaggcgccgggagtggccggaaaagggagaattatatttcatatcgatatgaacagtttttatgcctccgtagaaatggcgtatgatccgtctttaagaggaaaacctatcgccgttgccggaaacgtgaaggaacggaaaggaatcatcgtcacctgcagctacgaagcgagagcgcggggcgtaaagaccaccatgccggtgtggcgggcaaaacgcctctgtccggaactcatcgtcgtgcctccgaattttgaccgctaccggagttcgtcaaaagaaatgttcagcattctgagggagtatacggatttagtcgagcctgtttctattgatgaaggatacatggatattacggacacaccgcacagacacagggcgtatgagacagccgcagacattcaggcgagactgcaaaaagagcttttgctcccgtcaagcatcggcatcgccccgaataaatttctcgctaaaatggcgtctgacatgaaaaaaccgctcggcatcaccattttaagaaaaagagagctgccggacgtcttatggcctcttccgatagaagagatgcacggtataggaacgaaaactgcggaaaaaataaaaacgctcggcatcaaaacgatcggtgatttggcaaaaggagatgaacacgcgctgaaaacgcttctcggcataaacggcccgaggctgaaggataaagccaacggcatccatcctgcagaagtcaatcccgagcggatttatgaatttaaaagcgtcggcaactcatccaccctgtcgcatgattcggctgactgggatgaattaacgggcgtgtttgaccggcttgcgctttctgtgagcgaacggctccagcgtaaggaggtcatggcctgccggctgttcatcatgattcggtatgcggattggaaaacggtcacaagaagcatgaccctcagcaatccggctgatcagaaaaaagacatcatggaagcggcgatggaactgtttgacaagcactggaaccaaaatccggtaaggcttctcggcatcaccgggacggaactggttgaaaaacagcaggcgtataaacagcttgatctgttttcattcaaggaggacgcaaaggatgagccgatttttcagatgatgaacgagctgaatgaaaagtacggccaaaacctgatcagaaaaggcgccgttataaaaaaagaagaaagcaaaacaaggggaacgagctttaacagagacttttttcaggatgaaaagaaaaggtgaataacttgaaaaaaggggttatgtatgataatttctttagtataaatatcattttattttaatttaaattttaaaatggttaaacgtttgaagaagggacgttagaatatgtcaaaacaacaaatcggagttatcggtcttgcggtaatgggtaaaaatctggctcttaacatcgaaagccggggattttctgtgtctgtatacaacagatcaagcagcaaaacggaagagtttttagaagaggcaaaaggcaaaaatgttgtcggtacatacagcattgaggagtttgtccagtctcttgaaacaccccgtaaaattttattaatggttaaagcgggaactgcaacggatgcgacgattcaatctcttcttcctcatctggaaaaagacgatattttgattgacggcggaaatacatactataaagatacacagcgccggaacaaagagcttgccgaaagcggcattcactttatcggaacgggtgtatcaggcggtgaagagggagcgctgaaagggccttctattatgccgggcggccaaaaggaagcgcacgaactcgtaaaaccgattttagaagccatttctgctaaagtggacggagaagcttgtacgacatacatcggcccggacggagcggggcactatgtaaaaatggtgcacaatggtatcgaatacggtgacatgcagctgatctctgagtcatatttcattctgaaacaggtgctcggattgtctgccgaagagcttcacgaagtattcgctgagtggaacaaaggagagcttgacagctatctgatcgaaatcacggctgatattttcactaaaaaagatgaagaaacgggcaaaccgcttgttgacgtcatccttgataaagctggccaaaaaggaacgggtaaatggacaagccaaagcgctcttgacttaggcgtgccgcttccgattatcactgaatctgtttttgcgcgtttcatttccgcaatgaaagaagagcgtgtgaaagcaagcggccttctgtccggaccagacgttaagccggtcactgaaaataaagaagagctgattgaagcggtcagaaaagcgctcttcatgagtaaaatctgttcttacgcacaaggcttcgcccaaatgaaagccgcgtctgaagaatataactgggatctgaaatacggtgaaatcgcgatgatcttccgcggcggctgtatcatccgcgcggcgttcctgcaaaagatcaaagacgcatatgaccgtgaaccggagcttgataatctgctgttagacagctacttcaaaaacattgcagaaagctaccaaggcgcccttcgccaagtgatttcacttgccgtagcccaaggcgtgccggtaccttcgttctcaagcgcacttgcgtattacgacagctaccgtacggcagtgcttcctgcaaacttgattcaagcgcagcgtgattacttcggcgcgcatacgtatgaacgcacagataaagaaggcattttccatactgaatggatgaagtaatgaagaagcccccgcattgattgcgggggcttttcctgatattaaaaaccgcgggccgtcatgaacggcgccgcggtttttaaattttttcttatatattccaccagtggaggccgtctttttcaagaagatcgtccgaagctttcggtcccattgacccggcttcataattcggagaaagggttttgtcggctgcccacgtttcggaaatcgcatcgacgaaattccaggaaagcgccacttcgtcccaatgggcaaagtttgtcgcatcaccgagcagacagtcatggattaatttttcataggcttccggtgtgttcatttcatcactgcagttgctgcagtaatccagcttaatcggctgagcatgagcggctccgcctaattttttagcgttcagatatagtgtgatgccttcatccggctgaatatggatgacaagcaggttcggatttacattcgtttcattgccgtaataaaggttcatcggaatgtctttaaattgaacgacgattttcgttgatttttctttcatccgtttccctgtgcggatataaaacggaacgccggcccagcggaagttatcgattaacagctttccggacacgaatgtttccgtattggaatccggtgctacattttgttcatctgtatagctcggtacagcgtttccgtcaatctttcccgcttggtattgtccgcggacgaagaagtcactcacttcgtttggagcgacagggcggagagctctcagcaccttcactttttcgctgcggatttcttccgtgttcagtttaatcggcggttccatcgccaagagagcgaccatttgcaaaatatggttttggaccatatcacggagtgcgcctgatttttcataatatctcgcgcggtcttcaacgccgagatcctcacttgacgtaatctggatgtttgagatgtagcggttattccacagcggctcaaacagcgcatttgcaaaccggatgacttcgatattttgaaccatttgtttgcctaagtaatggtcgatccggtaaatttgatcttccgtgaaagcttcgcgtatttctttgttaagctctttcgcactcggcagatcatggccgaacggtttttcaatgacgagacgggaccagccatttgtcgctgtgacaccttcgtttttaagtgattttgcgatagtgccgaaaaactcaggagccatcgccaagtaaaacattctgttgttcgggatttcatatgtatgttcaagctgatcaagcaggacattcagctcctgataggaacccggattcgttacatcaaacggatggtaataaaaatgagatgtgaaatcgtctatgtctttttgcccggcagaagaaacagacgttttaaccgtttcccggaggtcctcgtttgaccaaggtcttcttccaacacctacaactgcaaactcttcaccaatttgaccatttttatataaacggtgaatggatgggtaaagttttcgttttgccaaatcccctgtggcaccaaatattacaattactgcttttggtttgtcgtttgttttcacttagagtacctcactttatctgaagcatggtttaaaaccccgcatatttccttcattttaaatctaaaattcgttgaaagcaaacatttcagcctgttttttgcggtttgcggaaaaaaattaatcaggccggagaaggcccgggtgaattcacattttcagcctgatcctgtatccttagtagtacaaagatctaggaggaagcattgtggaattattatttttagggacgggggccggcatgccggcaaagacgagaaacgtaacgtccgtcgcgctgaagcttcttgaagaaaggcgttccgtatggctgtttgattgcggagaagccactcagcatcagatattacatacaacaatcaaaccgaggaaaatagaaaagattttcatcacccaccttcacggcgaccatgtttacggtcttccgggtctgttggggagccgttcatttcagggcggtgaagaagagctgacgatttacgggccaaaaggcattaaagcctttatcgaaacaagcctgaacgtgacggcgactcatctgacgtatcctcttaccgtacatgaaatcgaagaggggacggtttttgaagatgagcacttcattgttaccgcagcatccgtcattcacggtgtggaagcgttcggctaccgggttcaggaaaaggatattcccggcgcattgcaggccggcagattgaaagaaatgaatatcccgcccggacccgtctatcagaaactcaaaaaaggcgaaacggtcacacttgacgatggcagaatcattaacggacgggattttctggaatccccgaaaaaagggagaatcgtcgctttttccggggatacgagggcatcagagcgggtaacggagcttgcgcgcaatgcggatgtgcttgttcatgaagcgacgtttgccaaggaagatgcaaagctcgcacataattattatcacgcgacgacagaacaggctgcgcaaacggcaaaaaaagcaggcgccaaacagctgatcttaactcatatcagcgcaaggtatcagggtgaatcgccgatagagcgtctcgaacatgaggcgaaagcggtatttgaaaacagtaagatcgcatttgatttcatggaggtcactgtggagcggtcttaaaaaatagacgcttgacatttttttctgatgagatataataaaacgtaataattacgatttgtataaggggtgaaaatgatgcgtgtgaatgttacattggcctgtacagagacaggggacagaaattatatcacgacgaagaacaaacggacgaatccggaccggttagaaatgaaaaagtattcaccccggttgaaaaagtatactttgcatcgtgagacaaaatagatcacgataacaaaagccattgtgccgttgcacaatggcttttgttttatcagtttaccgcctgataggcaggagcattcatttgctggcgcaccgcgcaccaaacatcataaatggcaaggtggacgatgtgcggttcatcgtggtgaatggcatgagaactgtttttggcctgaatccatccgctttgataagagacatcaagcatgcttctgtgcagtttcacccattgttcatgagcgtgctttaagcgctcatcccgctctcccgatgataaaatcaacagcggcatatcgccgaaatgaatctgctggtgcttgatctgacgaaggctcgtcaaaaattccgcgtgtgatccttccaatatgaactgtttcaaataggcggctttcatttcttcgggaagaagcggaagcactttcgtctcctgatcctcagaaaccggatcaagcatcaccatcccgagaatatcccggcggttccggctcgcccaaagtctgctgataatcgcgccgtatgaatgcgagacgacaagataaggaggcttgacgccggccttcagaagaagagcgtttaattcctgtaccatgtggtccgccgttctctcgtttcggctttgtccgcttttgccgattccggctctgtcatatgtgaaaaccccaaattcttcatctatgtcagcgagtaatgatgtccatgtttcagaagaagtgccgtagccggcttcaaagacgatcgtcacttcgccggcgcctttacggtgtttcgtataaaacggacacccgtcaatcagatatgtcctttccatccatgctgctttcattggagtcatcccctctaattggttctatagggaagacggagaagcttcggcaatcgtttctcaaaaaataaaaaaagagacagccggatcgaaaaactccggctgtcatttcatcaccatgctctgtcgtattgaaccggtgacggtatttcagtattcagctgcttcgctgcactccttgcaaagtgcggatcgcgcagaagttctcttgcgacaaaaataaggtcagcgcggttgttttgcagaatttcttccgccattgttcccgtcgttatcaaaccgacggcgcctgttgcgatttcggcctgttcacggattttctctgcgaagctcacttggtagcctgggaagacattaatatcagcttgaacgagtgcgcctgagctgcaatcaatgaggtcgactccctgttctttcatccacttcgcaaaaccgatatgatccgcaatgtccagccctttgtctgtataatccgatgcagaaatacggacaaataacgggccgtcccagacttccttgacagcttcaatggtctcgcctaagaagcggtagcgattttcatgtgagcctccgtattcgtctgtacggtgattggacagaggggacaaaaattcgtgcattaagtagccgtgtgccgcatgaagttcaataatatcaaagccggcttctttcgcgcgcgccgctgcctgtttgaattcctgaatggtttctttaatttgttctgtcgtcatttcagccggtgttttggactgctcatcgaacggaatggctgacggagcgtaaatgtctccctcaagctcagctttacgtccggcgtgcgcaagctgaatgccgattttagatccttgcgctttcacttgttccgtcagtttggcaaaaccttcgatatgatcatcgctccaaatgcccaaatcctgatcggaaatgcgcccctgcggattaacggctgtcgcttccacgataatcaggccgacctgtccgattgcacgcgatatgtagtgcgccatatgaaaaggctgcagttttccgtccttctcatgtgaggaatacatgcacatcggtgccataacaatacggtttttgatcgttacatctttaacggtccatggtgtgaataattttctggccatttatttcgcctcccggaatgtttttagacattgattataacaactcatgatcattcagtcatataaactgctcgcaactgaacacatcgttcttattgttctggacgggcatttttttatacacagcgtggccgtatcttcataacaggcatttacagccgatcatatagcaaatatagatgagaaacgcaccgatgactgcgtggcctcctttgaaccagtttgtcaggatgagtatattgctgatgaagatcaccgcgccgaaggcaccgaatattccgtttttttgagcggctctgaaatcgtcggggctcatatttttcagctgtaagtgaatattcagtaacgtcatgggcgcagcctgtattaaagtggctttcttatgtgccggtctgcattcttacagcaaacgcttttgatcaattggccgggtttgatcgtccttatcccgaccatcgtgatcgccttgaaaacaaaaagtttgaccgtgacggtggtgagcggggttatttcggtgtcgggctttcgtctgtttatataataaaagcatcaacggcacatgctgttgatgcttttattgaaatgctagggtttggagagcacttcaattccgacgttgaccattttgtccagtcccataaaagacaggcagattttggcgcgtctttttcttttatcgatctttttaataatgccttccattcctttaagaggccctgaggcaacggttacttttgaattttcaatatagacttttgaataatctacagtgtctccttctccgatcagcctgatgatagggaggatttcttcatccttaattgtcgtgaaataggttttacgctctttggaataatatgcgccgttattcacgattctgcatgaaatggggagttctttgattttatgaaatgtccgctctgtcatcttcgttttaaacagcacatatcccggaaacatctttttgagtgcctcgtatttgattccggcttttcgttctgtgacttttttcttgggtatgattgagtagagagcctgctcatcaaactgcagacgcagaaatttttgaactgtttcttcttttccggactctacaaaaagtgcgtaccatttcatgactggatcctccttagaataataagaaattattatacaaagaaagtatttaatggatagtatttaaaatgattaaaaatttttctaattcatcttttttttacataatatatgaaaatgaaaaataagtatagacccaattgacagagaagcgatgaattttctttgacatgaatagggttcagggaattatctgacatttatcccgaaacaattatgccgactgtccaccgaacataaaactgtggaataaatgtcagaaaataacgaaataaatccttgacattattatctataaattgatattattctctttaaatagcaactatttgttaaatttattaaattgatgtaaagcacctattaaatttcaatcgctgtttcggcacgttgaagaggaaatagggattataaaaatgattgtagtgtatatatctacatatacatgataagggagaagtgtgccgtcatcgctgttttcgggcatattggcactgcagcttgtcatgcgaaacattcagtaaacaagcaagatgtctttatataaattatgttagaaaaggaaaacacaatgcgtttgcgatttttaaacctgtgctgaatcgcaaacgcgtttgtgtttttatttttatgccggtgtttacaccagtcaatatatgaaataagagacgtttttgtatggagatccacatgtgatgtacaaaattggcgatgcggaaaggatgagggtaagatgcttacgtttgtgttcccggggcagggttctcaatttaaaggaatgggagccggactgtttgatgaatttcaagatctgacacgtcaggctgatgacatattaggctactctatagaagaattgtgtctggaggatccgaatcaccagctggggaaaacgcaatttacccagccggcgttatatacggtgagtgcactcagttatttaaagaaaatgaaagagtccggcagagagcctgattacgccgcagggcacagtttaggagaatataatgcgttatttgcggccggctgctttgattttgagaccggtttgcagcttgtaaaaaaaagaggggagctcatgagcaaggcagctcccggaggcatggcggcggttttggggtttaccgctgaacaagtaaaagaggttctatccgattatcatctgaccggcattgatatcgctaaccacaattcaccttcgcaaattgtgatcgccggaacgaaacaagacattgaaaaagcgggccccgtctttgaaaaagccggcgtgagaatgtaccttcctttaaatgtgagcggcgccttccattcccgctatatgaaagatgctgaaaaagagttcgcggattatttagaagaaacggcgtttttgcctcttcgttttccggtgatctcaaatcttcatgccgcaccttataagaatgatgaaatcaaaacaaatctgactttgcaaatgaccaatcaggtaaagtggacggacacgatacgccgtctgatgggacttgaaaataatgaaattgcagaagtcgggcccggggaagtgctgacaaaactgacgcgtcagattaaaaaagatgccgtcccattacctatgccgaaagaagagtctgatactgctgatgttaaagcatcggcagctgatccgcaaaaaacggcgggaatgagattagggaacgaagattttaaaaaagattataacatccaatatgcttacatgacgggctccatgtacaggggaattgcttcggaacagatggtcattaaagcggcaaaagcgggaatgctgggctttttcggaacgggcggattgagtatcgaacggatcggacaggccatcggaaccatccggtctgcactgcggcaaggggaaacattcggaatgaatcttcttcatcatatgatgtcacctgacaaggaagtcagaatgatagatttatatttgaaaaacggcattcatcttattgaagcatcggcatttatgggcataacccccgctcttgttatatacagggcaaagggattaaccaggaatcatgacgggtcggtgtcagttcaaaacagaatcatcgcgaaagtatcccggcctgaagtcgctgaggcctttctgaatccggctccggctcatgtgctggaaagacttgtgtctgacaatcggctgacagccggggaagcggcgcttgcaaaagaaattccgatggctgatgacatttgcgttgaagcggattcaggagggcataccgaccaagggattccgtatacattaatgcctgccatgatcagactcagagaccgcatgatggagaagcacggttatgcgaaaaaagtaagaatcggcgcagcgggcggcatcggcactccggaagcggctgctgccgcgtttctgctcggcgccgaatttatcggaaccggttctattaatcaatgcacggtcgaagccgggacaagtgattcagtgaaagatctgcttcaggaagcgaacgtgcaggatacgtcatacgctcccgcgggagatatgtttgaagcgggagcaagggtgcaggtgctgaaaaaaggtctgtttttcccggcaagagccaataaactctttgacttgtacagacaatacaattccttagatgaaatagatgaaaaaacgaaaacattaattgaagaaaagtatttccagcgcagttttgaagaggtgtatgagcagttgaaacgtgataaatctcctgagcagatcgccaaaaccgaacagaatccgaaacacaaaatggcgatggtatttaaatggtatttttctcatacgacaaggctcgctctggaaggaaaaagcgaaagtaaaatagattaccaaattcattgcggccctgcgctcggcgcgtttaatcaatgggtgaaaggaaccccgcttgaaaattggagaaacaggcatgtcgatctgatcggcaaacagctcatggaagaaacagccggccttcttgcgcaaaggctggtatcgattacaggctgagtatgaccagccattacattttttctgcggaggacagaccatgctgattgaaaatcatgaattaacgatgagccatgtcgggttagggaatttgaatgagtacgcgctgctgctgttattcggcaacgcacacagtcaccatttaacggacggaacgggattccggcctgatcagatggccgatcaccaagggctgattttgtatccggcttattttatgacacatctcaaagttccttcagatcagcctcttgatcagtaccgattatgggacgaggtttccgtcggagtcgatatctcccggtttggagaaaccatattagaatctgattatttgttcgggccgaaaggagcggtcagctctgataaaagcgagtgggaccggggacggtttccttctatgaaagccaatagtttaattgtcgtcgacgtcacacaaacagaaggttcgacgcgcaaagtttcagcgcctaaggctgaatgcattgcggaactttctaagctagccaagccgccttacgccctgatgcggtcaaagaaaatcagaacggacgccttcggtatgaagccgggcaatctcaaaacagcagaccccgtttcatatcgggttcctgttgatcaggatgctgcgcccgggcatgccatggtgtttgcgaaattcagcaagataatggatgcggcggaatttgaatggatgacgcgccgatcgaagccgggttttccggtttcaatcgcgcggcatttatttttgcttgaaagagagacgtattattacggaaattgttttgcggatgaagagcttgatatttatatgacgggacacattgaagaatgcgatcccgactttcacggtgagtccctcggtatgatctcagtggcgaaaatcagctatcagattgaagtctatatgaaaagaaatcatacattgctggccatttccaaggtggacaagctgctggcggtgccgacctcttcacaagatcatattccggattataagcgggtcatcagaagtttataaaatgaagaatggagctgaaagcaaatggaacaaaccaaggaaatgaagcagatcatcgctcaaatcattcaggacattcaagaacagcagtcatatcgggccgtcgaagcgggagatgatgtgagagtcatagaggatctgggcttctcatcactggatatcgctcaattagtcgcacagatggagatggaaaccggagtagatcctttttcccaaggagaaacaatttccagcattacaaccgtcggcagcatttgtgatatttatcaaaaatatatggacagtgctcaatcatgaaaacagaaagcgggggagatatcagctgggtgactgataagcttagggaaacgcaagacagtgagtttctcatttttaaagggcagacttttacgtatgatgatttgctgacacgaattagcttttttcagaaagaacttgaacaaaacggaatacgtgaaggagaatgtgtggcgcttatcggggattattccccgaacgctatttttttgctgatggcgcttttgttaaaccgaaatatcgttgtccctctcagcaatgaatcaagggaaaagcatctcgatatgtttgaagacgcgaaagtgaatcaaatcattgaaataaatgaaaatgacagctggacgcttcgtgaaggttctgaaagcgcctcccaccctctgcttgatgacctgcgcgagagaggggagtcaggcattattattttcacatcgggaacctccggcaaaagcaaagcatccgtgttaagcgccggccggctgcttgaaaaatataaaacggcgaagagaaaaccgctgcgtacgctcatttttctgaaattggatcatatcggcggcattaatacgctgtttgcgattctgtttaacggggggaccatcgtcacatcagacagcagaacgccggagtccgtttatcaggcggtcgacaagcatgctgtccaagtgctccccgcaaccccgacctttttaaacatgctgctgatgtccaaggcggatgccggctataacctctcttcactccggctgatcacttacggcacagaaccgatgccccaatcaacgctgcgcggcattcaccggctgtttccggatgtacggctgaaacaaacatacggattaactgaactgggtatattctcaacgaaatcaaaagacagccaatccacttggatgaaagtgggcggtgccggaacagagaccaaaattaccggaggcacgctttgggtccgttctgagtcggcgatgctcggctatttaaacgcaccgtcacctttcgatgaagacggctggtatgacaccggtgaccaggtggaaacagacggcgaatatataagaatccttggaagaaagagtgaaatcattaatgtgggcggagagaaagtgtttccggcagaggtggaaagcgtctttctggagataccgaatgtccgggatgttctcataacgggaagaaaaaatccgattacgggcgagattgtcgcagcagaggccgtgcttgaaaaagaggaagatatcaaatctttcagaaagcgggccgtagttcattgcaaacagaagctgcagccatatcagataccgcagatcatctctgttacagatcggaaactgtctaatgaccgatttaaaaaaataagaaacgtgtaaaacaggaggcaaatatgaataacggaaaagtagcggtcgtcagcggaggaagccgggggctcggaaaagcgattgtacagacgcttttggatgaggattacaaagtagccgctttcagccgcagtgaatctgattttattaacacattgagagagagtgaaaagtaccgcggccgcttttattgggaagcggcggatgcggcggatgatgccgccatgaaacagtttgttcttcaagtataccgcaagttttccagaatagacggcttggtcaataacgccggtttgaaccttgatcagctgctgcccctgaccaatgatgaagacattgaccgcatcctcaatctgaatatcggctcagtcatcaagctgacccgaaacgtttcccgtgtcatgctgaaacaaaattccggatcaatcgttaacataagctccattatcggctcaagaggatttaaaggcacttcagtctacagcgcatccaaagcggctcttgacggcttgacgcgaagcctggccagggagctcgggtctaaaggaatccgtgtcaattcacttgcgcccggttttgtggacaccgatatgacgaaaaatatgccggaaaaacaaaaatcgcagattatcagaaggacgccgatgggacgtttaggcgaaacagacgatatgaccggactcgttcgtttcctgctttctcctgaatcgtcctttatgaccggacagacaatggcaatagacggcggattaacttgttaaagcacagaaaaattcttttgtacaagggatggtatcctcatgaaatgtattaacgaatttttaagaacggtaatatcggaaaagctgggtgccgaggtgaccgaagcggaagataaaaccgctttttttactcttggcgtgacgtctctcatcagtgaagaaatcatgaccatattgcataaagagtttaccggcctttctgaaacgctgctgtttgaatatccgaacattgagaaattgagtgagtttttaagtgcgcagaaacgaaatcccgaaagcgttcttgaattcaaagaaacggagcctgatacgggaagcccgcaggaagaagaattgcttcccgtacaggcggctgaaaaggtgcctgaaccgggaacgggcgggagctctgatattgcggttatcggaatgagcgggatgtttccgaaagcggaaaaccagcatgatttttgggacaatttaatggaaaataaagattgtgtctccgaaatcccagaggacagatgggacagctcttattactcggaagagaaaacggcagaatacgcgtcatacagtaaatggggaggttttattgatcatccggatcaatttgacccgctgtttttttctgtttccccgtgggaagctgatttaatggacccccagcaaaaattgtatgtcacgtgctgctgggaagcgatggaggatgccggttacgggaacccggcggcgaggccgacggatcaaatcggtgtattcgccggagtgacctggaatgaatattcattaattgcacacgaagaaggtttcctcaaagatcagtacaaaggccccggctccttatattggggcattccgaaccgggtttcttatttccttgatctccatggcccgagcatcgctgttgatacggcgtgttcttcatcgcttgtcgccgtccatcaggcttgtcaggccattatgtcgggcgactgtgaaatggcgcttgccggaggcgtcaacctcagcttacatccgcaaaaatacatgtttttaagccaatcgcattttctgtcttctgaaggaaaatgccgcagtttcggtgaaggcggagacggttacgtgcccggcgaaggcgcgggagccgttttgttaaaaccactgaaaaaagcgattgcggataaagaccacatctacggtgtcattaaggggtccgccactaatcacggcggcaaaacgaccgggtatacggtgccgaatccggaagcgcaccgggacctgattttatccgctctaaacagagccgcggtaagtccggcggatatcagctacattgaagctcacggaaccggcacggcactcggcgatccgattgagatacgcggcctgtctatggcatttgataaacagaccgatgagaaaaactattgcggaatcggctcggtgaaatccaatatcggacatttggaagcggctgcagggatcgccggtttaatcaaggtgcttttaagcatgaaacatgaaacgcttcccgccagtctgcactccgaggaactgaaccgcaagatttctttttctgattcgccattttatgtcgtccgaaacaaccggccgtggccggctgaaggagataaaccgagaatcgccgcaatcagttcattcggcgcaggaggctctaatgcccatctgatcgtaggtgcttatcagccaaaacggcaagcggacaagaatactgagcaaaaaccgcatgccgtcgtattaagcgcacattccgaacagcagctgaaagaatatgccgggaaattgagctcctttcttgaccgattggaaaacctgccttctgccggcggatacagtctggaaaatatcgctgccaccttattgtcaggcagagagcctttctccttccggcttgctgtcattgcatcatccctttctgagctgaaacggcgattggacggatttgtaagcggtcacagcgtcggcaggtatatgtacttcggaaaagcgtcacccgggcgtccggacgtttcaggccaatccgtttcagatcctgagaaatttgccgcgctgtgggtgaaaggccttcaaggttgcaaaaagccggaaacgccgtatcagaaagttccgcttcctacgtatccgtttttaaaggaaacgtcctggctgaccgatcaaaaaaagcggtatacaaaaaagccccaaaatatcaaaaggcgtgaatcgctgcatcctctgcttgatgagaatatttcatccgcccggaaagggacgtttcaaaagatattttccaaggatgaatatttctttaaagatcatttagtgaacgaaaaatatgtgcttcccggagtctgtcatctggaaatggcggcatacggcgcgggattgtggggagaacgcccggtcgtctctcttcaaagtgtgtggtacatggagccgattgtgacagggacagacccaagatccgtcatgatagagtttgaagcagaaaaagagcgtataagctatgtcattaaagaaaaaggagcggacggcaccctcttttcgcaaggagaagtgatttgtaaagaaaaaggagcgtcttttgaggccccggcctttcagctcccggcggcatttgcgcagagaacggagccggaagacatctatcactcgttctctgaggcgggaatcgttcaaaaggacagttttcaggtcatccgcgaattctcttatacagaaaggaaagcactggccaaattaacgctcccgtcacacttggaagccgattttaaacagtacatcctacatccgtccttaatggatggcgctgttcaaactgcaatggcgcatgtgctgcaatttcaaaaagagcctgcgcttatcgtaccgttttccttcggagaaatacagctgcttgaaccgttagcgaaaaccgtatttgtgcatgcagaggtaaaagcggcctccgttcaccaatttgatctgcatatttgtgatgagcgcggcgtgctgttggcggcagtgaaagattttatcataaaagaggtgcaggaaagcgccgggtttaaccaaaaagccggcgtcacgccgaagacaagccgtgaaacggaattgcttatgacaccggtttggaacaccgtcaccattccggaaaccggcatgtctttcatgcgtatgcatgaagaaaaaataatcgtcatcggggccggtccggattttcagcaggctttgaaagagatgtattccgatgtccgttttccggacatcacttctttggacagcgcggaacaaatggctgaaacattgaaagcgcaaggctcttttcaacacatgatatgggcggcgccggatcatcccattccatccgtttatgatgcggatacggccgagggacaggagcacggggtcatgcagcttttccggctggtaaaagcgcttctgcttctgaattttgacacggaacaactatcattgacaatctgcacgtttcaagcacagccgattcatgaacatgatgaggtcaatccgagtcatgcaagcatacacggattagcggggtcgctcgcaaaagaatacagcaattggagcatccggcttcttgatttggaatctcaaaggggagaccggcatctccccgatgtcttctctttaccgtcggaccccgagggaaatccgtgggtctttcgtgcaggtcagtggcaccgccagcaattggccgtctgccggcctcatgcagatgagccttcattataccggcacggcggggtttatgtgattatcggcggagcaggcggaataggagaagtatggactgaatatatgattcagacctatcaggcgaaaattgtctggatcgggaggcggaaaaaagatacacagattgaaagaaagctgaaaagacttgcggctttaggccccgcaccgcgatatttcagcgcggatgctgccgattatgactctctcaaacgggcgtatgacaccattgtaaaggaaaatggaaaggtccgcggaatcatccattccgccatcgtgttatcagaccgaagttttgccaatatggaagaggatcagttccgcgcgtcactttctgcaaaaactgatgtgagcttgcagattgcccgggtagctgaaggggaacccctggatttcttgctgtttttctcttcgatgatgtcgtttcaaaaagcgccgggacagagcaattatgccgccgggtgcacgtttaaagacgcttttgctaagcggatctcacagaaagcgccgtatgctgtaaaagttgtcaattggggcttttggggaagtgtcggcgttgtcgcttcagaacaataccggaaacggatggagcgggacggaatcgcttctattgaggcgtccgaagcgatgaaaacgctggaaaccctgctttccggaccccatgaccagctggcgctgatcaaaacgacagatccggtttttatgaaagacgatctgaaagaacaagtaacggtttatccggaaaagattccttccgcactcggacaattaacggttaacatcacgcagaatgacgaagctgagcggttaaaagcatcaagtgtcatgagctgcatgagagagatggaatcccttattgaaaaaatgcttgtatcaaccctttatgagatgggagccgggcttgatcaggctttgccgttatttcaatcggctgccggcataacggaacaatacagcagatggctggaagagagctttgccctcctgaataaattagcgcttgctccggaaaaaacggatctagggcaggtgtgggaggaatgggagcggaaaaaagagacttggctgcgccagaaagacatgagggcgcatgtcagattggcagaagagacattgcgtgtgcttccagacattttaaccggtaagcttccggcaacggaagtgatgttccctgactcctccttccgtcttgtggaaggcatttaccgcaataatatcatttctgattttttcaatgacaagcttgctgacacattgattgcagttttgaaggaacgtctggaaaaagatccgcaggcgaaaatccgcattttagaaatcggagccggaacgggcgggacgagcgctgcggtcatgagaaaattgaaaccatatgaagcgcatattgccgaatattgtttcacggatatttctaaagcatttcttttacatgcagaagacatattcggtccggaatatccttatgtcacttataaaatattcaacgctgagcagccggtatcagcagaagcgccggacatcggcacgtatgacgcagtgatcgcgaccaatgtgcttcatgcgacaaaaaatatccgctctacgctgcgccatgcgaaagcaatgctgcaaaaaaacggccagctgtttataaatgagatcaacagccgcaccatattcaaccatgtgacgttcggccttcttgaaggctggtggctgtatgaggatcatgatttacggattccgggctgtccgggggttgatccggccggctgggcggaagcgctttcgcttgaaggattcgtccatcctctgtttccggctgaagccgcacacgacttaggccagcagattatagcggctgaaagtgacggaacggtcaggcttgccctcacgcaggcgtcagatgagaagccggagcgccgtccgtatgacgcagaaggtctttcggatgatactttgcatgtcagcttgagagaaaaaagcgttgaactgatgaagaaggtaatcggtgaagcgcttaaagtgccggcgcatcgtcttttatcccatgaacctttaaccgcatacggattggattccatactggtcgtcagactgaccaacgcgttaaaagacgtcttcggttctgtcagcagcactttgttttttgaatatcaaaccattgatgagcttgctgattactttctgtcttcccgtaaagaagcgctcgagcggcaattcgggattggacgggctcatcccgaaaacgccggacggatgcaggctcccgcagaaagcgccgcgccgattccaaacgtaagggaacggggcatcacatatctgacggaattaataggaaaaacgctgaagattccgagcgggagaatggatccgtcggtttccttaaccgcatacggtttggattctattctggtcgtcaggctcacaaatgcctttcgtaacgtgtttgaccaaatgaccagcaccctcttttttgaatatcagacgatagaagaaatcgcggattacctgcttctttctcagcggggagcatttatgaaagcgatgggtgtgcgtgaggcacagctgtctgatcacacagataacctgaatgtaaaacaaaacaagattcctcaaaacgaggaaggcgaaagggcgaacggagatccctctatccagaatatcgctgtcatcggtctgtcaggccggtatccgggcgccgatcacgttgatgagctgtgggaaaatgtaaaagccggcaggcattctattactgaagtgccgaaagatcgctgggactggaaaacgttttataacgaggaacgcggaaaatgggggtccatttattcaaaatggggcggttttctcgatgacattgatacatttgatccgctgtttttccgtatatctcccgcggaagctgaaaggatggatccgcaggaaaggttgtttctgcagactgcttattcaagcattgaagatgcggggtacaccccggccacgctttgtgacagccggaaaatcggagtctttgtcggtgtgatgaacagcaattacccgacagttcccagcgactggtctatcgcaaacagagtatcgtttttgttcaatttccaagggccgagtatggctgtggatacagcctgctcttcttctttaacagctgtccatctcgccgcagaaagcctgcggagcggaatgagtgaaacagcgattgccggcggagtcaatcttatcgttgatccggcccactatgagcggctgtccgctttttcaatgctgtctcccggtgataaatgcaaatctttcggagacagtgcggacggttttgttgacggtgaaggagtaggggcgattgtgttaaagccgcttgctcaagcggagaaagacggcgatcatatttacggcgttattaaaggaagcatgctgaacgcagcaggcaggacaaacgcttatatggtgccgaatccgaaagcgcagtttgatctgatcgcagagacgttgaaacgaacagacattcacccgagaacggtcagttacttggaagcccacggaacgggcactgcgctcggtgatccgattgaaatcgacgggttaacgaaagcttttcgcctgacaacagaagatcggcagttttgttccatcggttccattaaatcaaatatcggacatttagaaagcgctgccgggattgcggggatcaccaaactgcttctgcaattgaaacataagaggattgccccttcattgcatgcggcggaattgaatccgaatattgagtttgagcacactccgtttttcgtacagcaaaaagaaacggaatggaaacgacctgtcttgaatatcacgggtgaaatgaaggaatatccgagaattgccggcatttcctcgtttggagcaggaggctcaaacgcgcatgtcatcattcaggaatttgtgccgtctgacagcctgaaaccaatggaaaacgcgtctgtttctccgcaaaaaccggctgttattattttatcagctcgaaatgagcagcaattgacagagcgcgcccgccagcttctggatgatgtcataagaaaaaaacgttctgacggggatttagccaagatcgcttacacgcttcagacgggaagagaaccgatggctgagcggcttgcatttacggccgagtcgatagaagaactgaaaatgaagcttatgagtttctcaaacgatcataatatcgaacatgctcatatctggcggggcaggacagccaaacatcattcattggcggcttcgctcacttctgatgaagatatggcgcttaccataaatgcctggctgaaaaaagggaaatacggaaagctgcttgacctttgggttaaaggacttgacgtcgattggtcagctctttatcagcgcaacccgggccgcatcagtctcccggcctacccttttgccaaagaccgatattgggtcacaaaagctgatgtgtcacttgacaaaacaggctcagcgaaaagtgagaaagcagccagacttcacccgctgctccatacgaatacatcgaccttgaccgcccagcgttttacttctgttttttcaggacatgaaccgttttttgccgatcacattgtcaatggaaaaccggtgcttccgggcgcggctgctttagaaatggcccgggccgccgttacacttgccgccgaagacttgcccggcgggaaaacgggtgtaaggctcaaacagatcgtttggctccgtccggtgacggcgctttctgaaggagtgacgcttcatgtaaagcttcagccggaagaaaacggagacattgcttttgaagcgtatgccgaaggagaagagccgcttgtctttttccagggaaaggccgtgctcgaagagacggagcgtgctcctgttctcgatgtggaagcggttcaggcgcgctgcagcggccggcgtatgtcaaaggc

SEQ ID NO: 5 - DNA, 298827 bp, Bacillus subtilis
ccccacgctttcgctcctcagcgtcagttacagaccagagagtcgccttcgccactggtgttcctccacatctctacgcatttcaccgctacacgtggaattccactctcctcttctgcactcaagttccccagtttccaatgaccctccccggttgagccgggggctttcacatcagacttaagaaaccgcctgcgagccctttacgcccaataattccggacaacgcttgccacctacgtattaccgcggctgctggcacgtagttagccgtggctttctggttaggtaccgtcaaggtgccgccctatttgaacggcacttgttcttccctaacaacagagctttacgatccgaaaaccttcatcactcacgcggcgttgctccgtcagactttcgtccattgcggaagattccctactgctgcctcccgtaggagtctgggccgtgtctcagtcccagtgtggccgatcaccctctcaggtcggctacgcatcgtcgccttggtgagccgttacctcaccaactagctaatgcgccgcgggtccatctgtaagtggtagccgaagccaccttttatgtctgaaccatgcggttcaaacaagcatccggtattagccccggtttcccggagttatcccagtcttacaggcaggttacccacgtgttactcacccgtccgccgctaacatcagggagcaagctcccatctgtccgctcgacttgcatgtattaggcacgccgccagcgttcgtcctgagccaggatcaaactctccgataaagtagtttgactgactacgcacatcgctgtgcgatttatttaaaactttgaattaacaggtacgttttgtcttgtttagttttcaaagatcatctcaacctcatctcgaggcgactttttcagtataacattccagcaagttgctgtcaaatgtttttttgtttttatttctccgccgctgtgagctttttgttgaagcgcatcagcgacgtttaataatataccatgcctatgattcagcgtcaacactttttttgaaagaatatcctcgatgatatacttcctgccctttggtctctatttgagatacttcaacaaagcctttttccgtcaggtaatcaagcatgacaccaagatcttgggtgaagtgcagcagttcagggtgctgcagcaattctccaaactgccacatttctttttctttcatcacttgaaaaaggtgcgcagaaccgatttcagcttttgaatggatgagaaaatcatttgctaagaataataattcgagccttttctccaaactttcgtgactctcgacaagttcggaatatagcttatatacctgcggctcaatgtgacggacctggttccagactgtcgtttcgggataaaacccccggtcaatcacttctatgcgggccaagtggtgaagagcatgcactaccgcataatatgcatccagaaaatgatcagcttcaaaaaacgcttttccttctacaaatcttctgatcagcttgccgtattccattccgatctttaatttccgctcggcgaaaggaaaagtgctgagccggtcattgagttcagatatatattcattgcggtcaaacagcactttgccgttgatgatccaatctatgactcttctatttgtcccaagcagaatccattcctgaagcagagcatccgttacaatatgtaaagaagcggttttttgttcgaattcataatgctttataaaaagaggttcatcagcctgtttgacaatgacaagcatgaccgcatcaaagttatccgtgatggatgatgctttactccttctctcaatcataaggacggccagcgtatcgggatgacttgctctttcttggtaaattggacggagaagattgtccattacgattcctccaatgcgattgtttcactagctattgtttctacatttctatgataaaacatgaaagtccttttttctaaacacattgcactattataacaaatttcctttcaggtgccatatttattcttcccttttcttacgaaaacatgaagaatataccatctgttttgtgctatagttaaacgagagggggatggacatggcgaaatactcaagcaaaattaataagatcagaacgtttgcgttaagtttggttttcgttgggtttatcattatgtacatcgggctgttctttaagcagtctgttttgcttgccagcttgtttatgattctcggcctgctgtcgatcgggctcagcaccgccgtttatttttggatcggcatgctgtccacaaaagcggtccgggtgatgtgccccgcttgcgagaaagaaacgaagattctgggcagagtggatatgtgcatgcattgcagagagccgcttacattggataaaggattggaaggcaaagcgttcgatgagtcttataacagaaaaaacagtgtaaaataaacgaagctgaccgtatcaaagcggtcagcttcgtttagtggttttcttttttggaacattcttggcagacgccgtaaatctccaaacggtggtggcttaccttaaaccccgtgacgtgagccgcaagctgttccacttcgtcaagcccgggataatggaagtctacgatttttccgcagctttcacaaatggcgtgataatggtcagaggtgacaaagtcaaatctgctggacgcatctccgtacgtcagttcctttacaagccccgcttcccggaatacacgcaaattgttatacactgtcgcaacactcatattagggaatttcccttccaaggctttatatatatcgtccgctgtcggatgtgccatagaatccacgagatattccagaatggcatgacgttgaggagtaatccggactcccgtatccttcaacgtgtctaaggcttcttttaattcatgtgcagccatccgtcatgcacctctcttctaaaaaagattcttactttataatgtttataattagtgtacatcttttctcggtctcctgtcaaatgtaatctgaagaaaaccccgtgagttcagcatttgtccattaattagacgcaatttgttccaattctcgaagcgcctcggcaacgtgatctttcacctttacctttctccactccttcacaagacggccttctttgtctaacaaaaaagtggatcgctcgatacccatatattctttcccaaaattcttcttcagcttccacacatcaaaagcttccgccaatttgtgctcatcatcaacgaggagctggaaaggaagatcgtgtttttgcttaaatttttcatgtttatcacggctgtcagggcttactcctatgataaccgcatcaagtcccgcgaaactttcgtgctgatcacggaaatcacatgcttccgtcgtgcatccgggtgtcatgtctttcggataaaaatagagaacgacgtacttccctttaaaatccgtcaatgctacttcttccccgctgtcattcactaatttcatatccggtgctgtttgtccgatttcaatcgtcatttcttatacctccgggttttttattaagcgtatccaattcacgttaagattacaaccgttatcctcccgctcttttctggaagcatgaaccgttgtgctcgcaatgaagcatgctacaatagaacatgatgtaaggagatattaggagggtcattttttgtatacaaaatcagttgaacttcataaggaagcgttagagcatatcgtcggaggcgtgaacagcccgtccagatcctataaagcggtaggcggcggttcacccgttgcgatggaaaaagcgaacggcgcttatttctgggatgtagacgggaatcagtatatcgattatttagcggcttacggcccgattattaccggacatgcccatccgcatattactgaagcgattaaaacagcggccgaaaacggcgtgctgtacgggacgccgaccaaacatgaggtcactttcgcaaaaatgctgaaggaggccattccttcacttgataaagtacgattcgtaaactcaggcactgaagcggtaatgacaacgatccgggttgcacgcgcttatacaggccggacaaaaatcattaaatttgccggctgctatcacggccattctgatctcgtacttgtcgctgcgggttccggcccgtctacgctcggcacccctgattccgccggcgtgccgaaaagcatcgccaatgaggtgattaccgttcctttcaatgacattgaaagctacaaagccgcgctggataaatggggttcggaaattgcagcggttctcgtcgagccgatcgtcggcaacttcggcatcgttgaacctgaagaaggatttttagaacaggtaaatgaattgacccataaagcgggcgcgctcgtcatttatgatgaagtgatcacggcgttccgttttatgtacggaggcgcgcaggatcttcttcaagtgaagcctgatttaacggcgctcggtaaaattatcgggggcggcttgccgatcggcgcttacggaggcaaaaaagagatcatggagcaggttgctccgctcggcccggcatatcaagccggcacaatggccggaaacccggcatctatcctatcaggcatcgcctgcctggaagtgctgaaggaagaaggcgtttatgagcggcttgatgagctcggcgccagacttgagcaaggcattctcgcccatgcggagacacacggcattaccatcaccgtcaaccgtttaaaaggcgcgctcacggtttacttcactgatgaaaagatcgtcaattacgagcaggcggaaaatacggacggagaagcattcgccaagttcttcaagctgatgcttgagcgcggcatcaatctcgctccatcgaagtatgaagcttggtttatcacaaccgcacatactgaagaggatatcgacgccactttacaagccgttgaagatgcgttcagacatatgaaaaaataactgctggaacaagcgggagcccggggcttccgcttgttctttttgtccgatttgtgagataatggttttttcaaaaaaagaccttgaataattggtatgatccctgtatattactttattgtttagcaaatcagccgacagggaaatgtaagtgtcagccgttcgttcggcacataatttattagagaaaggaatgcacgcacaaaccaatgaaacttggtgcccgcatttttaaaacagggattgcgattacgctcgcgctctacttagcatcatggatcggacttccgtcgccgatctttgccgggattgcagctatatttgccatacagccctctatttacaggtcttttcttatcattattgatcaggttcaggcaaatatcatcggcgctgtcatcgctacggcattcggactgattttcggaccgagtccgattatgatcggattgaccgcagtgattgtcatcacgatcatgttaaaactgaaaattgaacacaccatttcgattgcgctcgtgacggttatcgcaattttagaaacaccgggaaacagcttcctgacgttcgctctgatacgaacaagcaccgttattttaggcgtgctgtcttcttttattgtgaaccttgtgtttcttccgccgaaatacgaaacgaagctgactcatcatacggttgaatataccgatgagatcatgaaatggatcaggctgacgatgcgtcagtccacggaacactcgatattgaaagaggatattgagaagctgaaggaaaagatgatgaagcttgatcatacgtaccttctttataaagaggagagaagctactttaagaaaacgacgtatgtaaagtcgcgcaagcttgtattgttcagacaggcgattattacggcgaatcgggcgcttgatacgctgaaaaagctgcaccgctatgaaaacgagatttatcatatgccggaggaatttcaggagacgctgacagaagaaattgattatctgcttcattggcacgaaaggattctgatgcggacggtcggcaagatcaaaccgcatgatgacgacgctgaagaaagcataagatataaacagcttttgacgaagtctttcttgaaaaatcagcagaactgcgaggatgaactgcttgattacaatatgctcagcattatggctgcggttgcggaataccgcgagcagctggagcatctcgatacattaattacgagttttcagacataccacccgaaagacagcgaattagaaacagacgatgatgagtaacccggtgcttccgtaaaaccgggtttttttgcattcaaaaaaacgtatgccgcccattcggacggcatacgtttttgtatcagttcaaattctgaatcgtaaataagtgtctgtactggccgccttgggccattaattcctcgtgcgtgccggtttcgacgacggcgccgttttccatgacgacaattttatccgcgtgcgtaatcgtggacagcctgtgggcgacgataaatgtcgtccggtttttcgcaagcttttccatcgcttcctgaatgtagtgttcactttccagatcaagagccgatgtcgcttcatccaagattaacagcggcggattttttaagaatacacgcgcgatggaaatccgctgtttctgcccgcctgacaatttgacgccccgttcgccgactttggtttcataaccttcggggaaattcataataaattcatgggcatttgccgctttcgcagccgcaaccacctcatccagagacgctcccggtttaccgatggcgatattttcacgaatcgtctcactgaacagaaacgtatcctgaagcaccattccgacttgattgcggaggcttctcgcttcataatcgcgaatatctgtgccgtcaatcagcaggctgccgccggatacatcataaaaacgcggtatgaggctgacaagcgtcgatttaccgccgccgctcatcccgacgagcgcgacggtttccccttttgtcacctttaaggaaacgtcctgcaaaatcgtttcttttccttcctcataacggaacgagacatttcggaattcaacttcgcccttaatgccgtcagcttttactgcattcggtttatcagtcagttcatacggctcgtcgataaattcaaatatgcggtccattgaagcgatcgactgggtcagcgtcgtcgatgagttgatcaatcttctgaccggattgtacattctgtcaatatagccgacgaacgcaaccatcgtccctaccgtcagcggaccgtttatgacaaaataacccgcaaacgcgataacaagcagcggcgccaaatccgtaatggtattcacgactgcaaacgtttttgcgttccaattcgtatgacggatcgctctgtccagaaaatgtccgtttttttcatcaaaattggcttgttcataatcttcaatggcaaaacttctgatgacgggcatcccctgaactctttcgtgcaaatgtccctgaacttgggcgagtgcctgagaacgctcacgtgtcagttttcggaggcggccgtaaaagtatttcactgaaattccgtataacggaaacaaaatgacagatatcaatgtcagcttgacatcgagtgtaaacataatgcagatgacgatcagcaccgtcatcatatcaagccagatattcatcagtcccgttatgacaaagtcttttgtctgttcgacatcatttatcacccgggaaatgacttcgcccgttctcgtgttggcataaaacctcaggctcaatttttgaatatgatcaaacaatactcccctgatatcatagagcacccggctgcccgtccattgcgcgaagtattgccgatagtactctaccgggggacgcagaattaaaaacagcacaaacatgatacccatgatcgtgaatagcgatgatgttttagcgcttgccgttccgctcccttgaataatgtcatcgaccacgtattttaacagcagcgggagagccagcgggatggagaattttatgatgccgattaacactgtgataaaaatttgttttttataaggttttacaaattgcatatagcgtctgattacgcccacactttatccccctctctctttaaggcgtgtgagcccatgtgaaaaacctgttgacaccccaacaggttttttattgtattctttattttgtatagcgcagataccgttcataccacatatcaacaaattccggagcaaacggtcctttccgctgatgaatccagtgcagcagcgtattcagatactccttcagaatgctgtcgatctctttagggtaattcattgatttgcggtggtcatcgtattcatcctcgtcaagaatgttatacgtcatatccggaaacaccttgacatccaaatcgtaatcaatatatttgatggcctctccgtcataagcgaacggcgagctgatgttgcaataatagtgtactccgtcatctctcagcattccgatgacgttaaaccactgacgggcatgaaagtagcagatcgccggttctctcgtcacccacgtccgtccgtcggattccgtcaccattgtccggtcgttggctccgatgatacacaattccgtactttttaaaatcgtcgtttcattccaaattcgatgaagcagcccgttatgcttatagctgtgaatttgaatggtttctccttccttgggatatcccatatttctcccctactttctgtaaagccctgcagtcaatgcagccgcaattgctttccgacaagtcttttcactattataacgttacgaattaaaaaatgaaaataaaagaaccactccgcttccggaatggcacattcatttctgcacataggaagacggcttttccgtgctgcgataagactggatgacttgctctgtctgcctttggaataactcctgtatgccggccaggtcttttcgctttgtcgcaatttcgtcctgtacattgtccagctttgcatctctttccagactgatgagttccgcttccacctgccggcagcggtcaagttctgactgcagctcgagaagctgatccatgattttcatctgttcacttacaagcttttcaaactctgacatcgggttcctccttaggcttttaggttgatactccttaccatttcgattttacgccggaaaaccctttgactcattctgtagaggaatcacaagttttgtcgttttggcaacagaaaaaagcacttccatccgaagatgaagtgctttttcgtttcagtgattagctgttttgctgtttgttttgttcagcagattggttttgctttcttacctgctgcacatcagtttcactgccgaattcagtgccgtattgaccctgaccggaagctgattgctggttttgtcttttcacctgctgaacgtctgttttgctgtattttgagtttgccattgttatcacctccacgcactttagaatgcgcaggagatgataaggctattcatctttttttaaaacttatacgagcagagagcgtccgccgtcaataatgatggtctggccgcggatcatgtccgcttttgaagaaactaaaaactccaccgtatcgatcatatctttaatttcgaccattctgccggccggcgtattttggcgggcatcttccagcagttcatctctgttagggaaatgcttcagcgcgtccgtatcaatcgctccgcctgacaccgcgtttacgatgatatttttcggagacagctcaaccgccagataacgggttaacgattctaaagcggcttttgagactccgaccgtcgtatagttttcaagatagcggatgctgccgagcgagctgatgctgacgatgtggccgcctccgtttttctccatcatctttgccgcttcctgggcgcagaaaagcaatgctttcgcattgatattcatcgtccagtcccagtgtgtttcttcgagttccatgaccggtctcagcacgcctgaagccgcattattgacgaacacgtccagtctgccgaatgtttcgtcaatctggcggaacatgtctttgatttttgccggctggccgacattggctttaatgacgagcgttttaacgccgagtttttcaatttcttcggcggtttctaatgccgctttcttactgcgggcataattgatgacgatgttgtatcctttttccgcgagtctgatggcggctgctttcccgacgccgcggctgcttcccgtaatcagtgcgcatttattttgttccatttttcctcagctccttgctgtgtatagttcttttcattcaacaaacaataaaagcaatatgtgttgaaaggggtcttttatatgtatgtcggacgtgatatgggcgaattggccatgatgcccaaaaaagattggagagattcagagctcgcctatttccatcatgccttccagcaaattatgccgtatttaaacgaagaaggccagtccaaataccgggaactgattcaggaaatcgaagcccgcggcggactgaaacggaatgaagcggattatggccacggcactcgcgtcagctatgactgacgctttttacaggcggccgctttcttccgccattttccatatcttttgatgggaaacgggaaatgcgtattcctcgagctcctcttttgtgacccgtataaattccgttgtatccgacacttgttttactttaccgaaaaagaccgaaatattccagacgagatgggtgaaaacatgttctacgatgccttccagctccccgatttcagcggttgttcccatctctttttctaaataggcttcaagctgctctctttcggttttgattcctttctgagtttcggtattcggaaactcccacaagttggcgagcaagccttttggcggccgtttatgaatatagacatcgccttgatcgtctgtcagcacaacggctgccattgtttttattccgggctttttctttttgcttttaacgggcagctcccgctctgtcccttccgcaaatgccgaacagtgcttttgtacggggcaaagcaggcaggacggcgatttcggggtgcagatgatcgcgccgagctccattaaaccctgattgaattcagatggtttttcatgagaaatgaaagcggataccgcctgttcgaaaatggttctggttttaggttttgcgatatcgtcccatatggaaagaattctcgacatgacacgcatcacattgccgtctacggcgggaatcggtttgttgtatgcgatgctgagcacggcgccttttgtataagggccgacgcctttcagtccgccaaattccttttcctcggcagggacgactcccccgtaccgctcatgcacttcttttacggcactttgcagatttcttacacgggagtaataacccagcccttcccaggctttgagcactttttcctcatcggcttcagcgagcgccgaaacggtcggaaattgctcaacaaaccgccggaaataaggaatgacggtatctacgcgcgtctgctgcagcatcacctctgacacccacacccgatacgggtcctgattttctctccacggcagaattctctgttctctttcgaaccatgtaattaagtcctcgcgaaatttgtctatatctttttgtttcattttttcttcaagtgcgttcatatcttctcctcagatgtttcgggttccgcttttcttgacaccgtattttggtgtaaacttagggcacgttacgataatatgttacattaaatagtgataaagaaaaagcggaaacatatgagaacggcggataaacgccatgattgggcaaacagaaaatggggaatatcttataatgcgaaatatgcgggcaactgattgttaacgcctgctaggaggtcaacaatggatactggcactcacgttgtcatgggtatcgcgcttggcggaatcgcaactcttgatcctgccgtcggcatgcacacccccatgtctcaggcagttatgatcgccgctcttgccggctctcaggcacctgatattgataccatattgaagctgaaaaataatgccgtttatattcgaaatcatagagggttcacgcactccattcccgccgttttattttggtccgttctgattccgggtattttgtttatgttttatccggaagcgaactttttgcacctgtggctgtggacgcttctcgctgtcgttttgcatgtgtttgttgacatttttaacgcgtacggcacgcaggccatccgcccgttttcgcgaaaatggatcgctctcggtttaatcaatacctttgatccgtttattttcgtcagccatttggccgcgattgccgtgtggtatatcggaggtcatccgggcgtgacatttctgatgctttatatcatcctcgcaggatattacgccgtccggtttttgatgcagctgcggataaagcgaaggctgcgcgaaatgattgaagaggagattgaaaccatcattatttcgccgacgatgaaattcaggcagtggcgtatcgccgtgacgacggcgcatgccttttatgtcggcagaagctttgacggccatgtcgtgatattggatacattcaatcgcgtgcccgttccggaaaccgatgtgatgaaggccgcgaaacaggacgaaaatattgcagcctttctttcattttcccccgtttacaggtgggaggtcgatacctttaaagatcattatgaggtgcgctttattgatttgcgctaccggagcaaaggccactatccttttgtcgccatcgtccacctcagtcatgatttagagcttctctcttcttacacgggctggattttcagcgaggaaaaattgcagaaaaaattaaagctcggctctgtttaagagccgggcttcttttgtcttctcacatatatagccgcaaacacgaggctgatcaccgatagagcggccgcgggtttaaaaaacggcgggaaatacgttaattgaatatcgttttttcctttttgcgctttaaatccgataaaggaataatccgctttttcaatctgctcttttctgccgtttatcttcagctcccagcctttttcatatggaatcggaagcatgatatacggcgcgcgggttttgttatcatacgagatatgaagcgtatttccgcgccagctgagatcggcccgcggttctttttccgcttttcggtatgcgcttttcagcgtatcgtaccgttcttcataaagcgccagtctgtcaagctgatacgatcctttcggcagacggatttggatgttttttgttttcggcactctgacagtaagatcgttgacacctgttttgtaaatggattgattcgattttctcgttgtcgtgtaatcgttcacttttaatgtaaagccctggtccttcgctttattcttcaaataaaagctgacgtaataatcgccgccgtccatcttagcggcttgcggcgtaatgatcaggccgccgccgtcttcgtttaccgtcaggatgccgttatgataatcgccatgttcggccgctacctctgcatggcggatcatatttttcgcctcagtcgcttttttcgtgttggttgtgcttgattccatgacgatcccgtcaagcattgcccgctccctggcaagggcgggcgcttttttcaggccgccctcgttatatacgcgatcggctgtccgtacgaacggaagcatatattgattttgataaaccgcataatgggatgattccatgatttttttgaacccgtacggcacgccggcctcgtttgttttttccgtcatataatattttccgtaaagcaggctgtataaattagccctgtttcctaatgtcgcatagcggctgacgctttctctgcccatgtcaatctggaggtcgttccagtaaaaggacagcagattgcggttcaatatgcttgagtatacgctgaatccgttgaatccgtatatgatcggggtgttattgaaaacaccgttcatccaatctaaacgggcaaacggatcagggtctttttctttcagacgctgaatgagctctgattgctctttgcctttatagtcagcacccgtcataaaggtatgcgataccgtataaatcttcccgccttctgataaagcatatttttcatatgtattagccgtaagcacagccgtaagcaaaatgacggcatagacggcgggcaccgcgcctttcagtcttgtctttgctgcaaagaaagcggctatgctcagcaccagaagaaggatgacgggcaggttggcgtgatcagaaatatccagactgtaccgcctcacctggctccaatagagcagaacgacgagtacggcggacatcagcatactcttcatgctgatgtctgaaagcttagaaagcccggctgaaaccgttccggcaatcgtgaagcacaggacgtattcaaacctgttctgcggagctgaaaaaccgttaaaggcacttgccgcgaacggactgaagtgaaacagaatatacagcagactgattcccgcaaacagccggaacaagcggtttttgtataaagtaaatgtaaatagaaaaagcaaaaaagccgccggcaggatgataatccggctagaaaataaaatattgtcggaaaaatcaagccatgcaatatgctctgaatacggcggccgcagattatgaaggtatccgtacacgacaggaataaaggaaactgcgcttatgccgaacccgagaaggcccgacagaataaatatcctgcattgagtgagccttttcgcctcattgccttcaagggggatcatccacctgaataagatataaacgccgatgaaaatcagattaatatacgcaaaataaaagttgttgatcaatgtcagcgcacaggcgaagataaaccacgccggctttttttcccggatgattttttccgcgcccaacacaagcaacggcagccacaccatactgtcagtgaaaaagtcccaatatacctcatgccggaagtagataatcgagaccccgtacaacacggcgcccgtaaaagcaggtaccgtccgtttgacgaaataacggaacacacacgccgccgtgaatatgatcaaactctgcttggcgatgctgataaaaacggaggcctgcgcccaaaacagcgcatcagcctcacccgtcagctgaataagctgcaaaaagcggacagcggcggagataaacaggaatagaaaagaagtagagaaataatagccgagctgactgtacacgcccccgcccagtccgaacgaatagctgtaaaacagcctgccgttcatatattgatcaaacagcagctttttgaagaccgccatttgggcgatcccgtctccagaccccgtcatatagcggccttgcgaccactcttttaagaaaaaaatatgagcggctgccgcagccagcacacaggctgccggcaagatccatttattttttttcatacaacgtccccagaccctgcgcacagcggcggctgtttaatggttccacttgcgcttttttgtataattcgtttcattttgttctccgtacgttatattcgcttctttaattaaatagtgcgggcgtttttttgtttcatagtaaatccggccgatgtattctccgatgatgccgagactcaaaagctggatgccccctaaaaacagcacggcggaaataatggtgaagtatccgggtacggacacgccgtgtgtcagaatatgaacaaaggtcgttacaatataaaccatcgatagaagcaatatcagaataccggtgaaaaagcataccctaaggggcttgttgttgaaggagacgacaccgtccattccatagttgaacagattgctgaatgaccatttggacgtgccgttcttcctttcgacattttcataaaatacgattttctggtcaaacccgatccagcagaacagccctttcgagaaacggttcccttcactcagcttcaaaagggcatcaacggcctgccggctcagcaggcggaaatctccgaccccgtcacgcaggtccacttcgacggctttgttgataaatttataatacagggaagaaagcacggaacgcacggggctgtccccttttcggttgcgctgcgcgatgacttggtcatacccttcttcatagccttgaatgaagtctttcagcagatgggtcggatgctgcagatcggcgtccatcacgattaccgcttcgccctgcacgtgttcaaatcctgccaaaatggccgcttctttcccgaagttgcgggaaaaagatatgtatttgacgcgatggtttctggcggccagttctttaatctgctgaagggtgtcatccgcgcttccgtcattgatgtagaaaatttcatagtcataatgaatcgtctgaaactctttttttaaagattcatggatgagcttgacattgttcccttcattgtaagacggaataataattgagattaacctttgtttcatgaaggcaccttctttgtattattctttttttaggacggccttaaaggaattgtccgcaaaacttcagtaaggcttttcctttttttaatgacgtttaaaccatttttttgttacagggaaagaaaattttttctgcatatggtttatattttgtcatgtttttcggcagatatgagaaaaaaaagaaaaagtctgtacgcgggacagactttattgctgaaggtattcatgaatcaaatggctgacgatgcgcggtttttcgtgaatgacccaatgtgaggcatcatctatgaagattaagtcgccgtttggaatcatccgttttgtttccttggcgagctttttgctcagcgcttggtcattgacgccccatattaatcggtacggaacgggcattttaagcggaacggcagggcctaaaccgccggctctgatcgcccggtaccagttcagcatcgccgtgagcgctccttttctgccccaagcttctttgtagctgtcgacatcttcccgtgaaaaaagcgccggtcgttcggataagccgatcgcgtgatccaatacgcggtaattgtcttcagacaatctccgttccggcttttccggcagctgaaagaacgcgatataagagcttttcttccactgcggcgggtagaacggtgtgaccttccgcataaccgccgggtgcgggatattgaccgtgattaatttttcaacgtattgcggccgcgtggatgccaaatgccaggccacggctcctccccaatcgtggccgatgacgacggctttgtcatctgtaaaatgcgtgatcagcccgataatgtcgtctctgagcgtatcaatggtatagttttcaatgccctccggtttgtcactgagattatagccgcgctgatcaggcacgacaacatggtatccggcatccgccagcggtttgatctggctcttccagccgtaccagaattccggaaacccgtgcagcagcaccgccaaaggaccgtctttcggaccggctgaagccgtgtgcagcgtcactccgtttgtttcgatcatgtgaaacgtaatgtcattcatcgattctcctccccgtttgtttcaatcttctttctgttaagacgatgatcagtacgctgatcgcaatcaataatacggcctgaacgatcaaggcgaacggctgagtcagccggataagcaggctgcccgcaaatccagctgccgccgatataaggccgaacaaaatcatgagaagcgcactgaatcgattgccttctttccactgcgactcatccgccatagagcgcttcgtccgatatccgtacaggctgttgatcgacttcggcggaaaaaatgtgactaaaatgccggccgcagccatcagaaggccgccgattaccattatcatatctgtcactctccttttcatcttttacgaaaggaaaggcgaaaagtttcagaaaaaaagcaggctcattcgcctgcccgaatctttatttttgagttaagtcggccgttttcacataacctgctttcccgccgtatgtgacgtacgcccatttacggtcaaatcctccgtcatggctgaacccccagccgagcacattgacggtttcacccgctttaacggacccttttttgccggtttccaaagtcggcgtataaaaagcggtttgtttcgccgtcaccgccttcaccggctgcttcatcagaaaatgtgtggagatataggctttgtgacctttgtagtcaatctcagcccaatctgctccttgaagccgtttaacctttacggaatcctctgaacgaagcgtgccgataatcgacccttgtttatttggttctttgcggacgttaagttctcctgctttcacgatatatgtatctgctgcggtgtctatttttgtctggtgaactgctgcggcattcgctgccggatcgaaaaaaacggtgcctgcggctaaaaataagcaaagtcctgcggccggaataaatgcggttaacccctttttcatgttcattgtggttcctccccgctattttataagttattacacatttccacattccgccggtcgccaaacatgattttcctatttcttttataaaaaaaaccgccggacgatatccggcgggtgcactgctatgttaatgcaggagacccctgctttgatccaaataatgagaaacgtcttcccgaacgctctggaacatatggagcttgctgccgtatgattcgatccattccttgacgacgcgttccgtcatttgctctccttgatacgggcggccggcttttgcgtaagtcgcttcgaaatctccccataaaagctcaacccaagttcgcgcttgcaaatagctgagcatgtcatttttctcaagcagcaaattcgtcagtttgtcgatatatgtattcatgtctctgtctcctttccttgggaaaacctgctgcttttacgcagcttgtcacaggcatatactaactttacgtcttcagtccagaaggcgcaaccttttgatattggccgagggggaaaacaaatggtccggaacaaggcaaaaggatttcctaatcagaacaataataagtttgaaggcgaaccgcgggcaaaggatgactacgcttctaaacgggcggacggttcaattaattcgcacccgcaagaacgcatgagagcttcaggcagacgataacacacacaccgtaagagaccgggaatgacccggtctttttttttgcggaaaaaaacatccttttgcggtcataacgctaaataaattccataatatgttaaatattaaaccgaaagccggtagacaaaaaaggaggggttttataaaatgaagacagtttcaaaacgattgctgagccttaccgcattcttactgtcagtttcattatttgctgtttcagctgaagcagcgggcagcccgcagacatctgtatcaaacagcggtgaggagtttgacgcacatcagattcagcctgtacaaacaacacagacatcccccgcttatgaaggaacgggcctcatcaaaagacagcttgcacaaaacagcaaagctgacatcaagtcattaaagccttccagtattattgggacagacgaacgaatcagaatttctcctacaacatcatttccatatcgagcgacagcacagctgaccgttacatacagcggcagcacaagcacctacggatgcaccggtttttttgtcaatgccgacacgatcgttacggcgggacattgcgtgtatgaccagaaaaacggctgggcatcgaaaattacggcagctcccggccgcaacggatcatcgtacccgtacggctcttattcaggcaagacattctacagtgtcaaagggtggacagaaaacggtgacacaaactatgactacggggcaatcaaagtaaacgggtcgcccgggaataccgtcggctggtacggctaccggacgaccaacagttccagtccggccgggctttcctcaaccgtgacaggatatccgtgcgacaaagtgtccggttccatgtggtcggacagcaagccgattcgttctgccgagacatataaactcacttatacgacagatacgtttggctgccagagcggatcgcccgtttaccgcaattacagcgacaccggccagaccgccattgcgattcatacaaacggcgggtcgtcttacaatctgggaacaagggtgacaaacagtgtattcgacaacattcaatattggtcaaatcaataaagcttttgttttctttctcgccgcggccgttttatgcggatgcggcaaagcggatgattccgccgccaaaaaagtattgcccgttacgctccatgttgaggatgcagacggttcaccggcggccggtgtgacggtcaccgtgatgaaagcggcggagtcagatcatcagccgaatatagaccgcggagagataataggcaagactgatcaccacggcgagattgcatggaaaagcggcgcgaaaggaacctatgccgtcgtttttgaaaaagacggagtaccggaaacccggaatatgtccttagctgagaatgataaacatacggtgatcagcattacattgaaacactgaaaaaagcttgcaggcggaatatcccctgcaagctttttgttatcctttatgcacttggtattcataaacatctttcttctcagacagatgagcgaacgtggaaagcacaaggccgagagccgtcatcagcgcaccgccggcaaacagccatgagtaagatcccgttcccccgagaatcaatccgccgatccaggcgccgagcgcgtttgccaggttaaaggcggaaacgctcacagcagcggcgattgtcgtgccgttttcagaggaagaaataaccttggtctgcaaaagcggcggcgtgccgaacgcacatgcgccgaacaaaaatgtcgctgaaacggcggcggcgggaaaaacagcgatataagggaaaatcgccaagacgccgatcaagccgatcatcacaccgatcatcgtgcgtgtcagcagtttgagcggcactttccccgcgaagaaattccccgccactccgccgagaccgtaggcaaataatgcgcctgtgatgccgactgtgccgaaccccgctgcatctcttaaaatcggctcaataaacgtgtaagcgataaatacgcctgagtagccgagaatggtgatcgcaaaggaaaaaatcacttgcttatgcttaaagacactccattcattcatcagcatcggaatcactttcggtttccggttcggtacgaccagcatcagtccgatcagcccgatcatgcctaaaacggaaataatgaaaaagacggcccgccagttaagggcatcccctaaataagagccgaacgggacaccgagcatcagcgccacggttaatccgccgttcatggaagccgcggcggcggaacgtttttcaggcggcaccatttcactcgcaaacaccatggcgatcgcaaaaaaagctccgtggatggatgcggataaaattctggaaatcgccagcacggcgaagtttggcgcaaagacgctcatcaggttggcaaggacgaagatgcccattaaccctagcagcaccggctttcttggcagcttaaccgcgataatggttacgatcgggcccgtcaggcagacgctcgccgcgtacgccgtaacaagcatgcccgctgaagatacatgtatatgaaagtcatcggcaatcgacgtcagaatacccatgacagcatattccgtatacccgatggaaaatgtgcaaatcattaaaacaaaaatcattaatttcacagatggctgtttcattttgatattcaacgcaaatcgcctcctttttatttaaaaaacaacgaattccatcttaaaagatatcaaaaatgaattcaatcattttttactgaaaggttgaaacgaatgtgcccgaaaagaaaaagaggccggaaccggcctcttttgttattttttttcttttaaaacggaaatcggcagtgcttcttccccgtcagacggggaagatctgtgtccccaggcgaatacgccgttgatgtaatcaatacggaaagtgtcatcagaaccttctatctgatacaccccgccgggccgaaagtcttccgggttcagcatgtaagctttggccatcgtaatttttcgttcaagcacggccagttcatttacaatgcccatctgttccgcttttcgcgctttttccgtcagtcccgcaatttctgtctgtagttcatgaggcgtcatttgactgtatcgtttgtccatttcagtttactcctcttcctgcaagaattgatcaatatcgtcaatcgagaatccttttctgaataagtactgtttaaccttcattccgctttcataactgccgtcatagcggtatttcctgatcgctttttccgcatgagccttcagagcctccatctcggcttcatcatcattttcatactccgtctgctccagagcggcattgatgacgtcgaaagggaaaccttttcgctgaagctgcatctgcgcccgctgtttgatctcttttgtggacagctttttgtcctttttcaggattttgccgatatgtttcagcgcttcttgtatttgctcatcaaatgtaaacgcactgagcgtctccttgatggtatcgtcgtctattcctttcgctttcagctcgcggaacaggacgtcagggcctttgccgtttgtttttttgtgggtgctcgcataggcttcggcaaattctttgtcatttaagtagcggtaatcgtacagtttatggatgacttcagaaatgaccatgtccggtgtttcttttttcttcagatgatcccggacttctttttcagagcgcatccggtatgataaaaattctacggcgcggttaaaggcttttttcacgtcatcgccgtactggatttcaagaatgtcaagctcgtccagttctttcccttttttcaggtcaaaacgcacaagcacgtcggcgtcgacgctgaatgcatatttctcatcaagaaagatgttgaagcgctcggtatttttcttttgggtcgatatttttgtaataaacggcatcccggtctcctttcccgccccgatgttcaggcgtttttctttttggcaaatgaggtacagtatatgtatcaacgtgtaaggagagatggatatgaatatcgcgatgacaggcggcactggttttctgggccggcatctgacaggtgtgtttacccgccggggacatcatgtctatattttatcaagaaaacagagagaaaccgaacaaaaaaatgtgacatatgttcaatggctggccgaaaacgcggcgcctgagcgcgagcttccccctattgatgtatgggtgaacctcgccggcaaatccatctttgaccgctggacggacacaacgaaggaacaaatcatctcaagcagaatagaagcgacgagagaagtcagacggattataaagcagcagccaaaaaaaccccgggctttgattcaggccagcgccgtcggcatttacggcacaagcacagaaaaaacgttcaccgaacagtcagatacgtcaaatgaagattttctcagtcatacggctcatatgtgggaacgtgaaggccagaaaattgaagcgctcggcatccggacggtatatgccagattcggggtgatgctcggtgaaaaaggcgccctgccgctcatggttctcccttataaactgttagccggcggcaccatcggctctggacggcaatggctgtcatgggttcatgtggatgacgccgcggaactcatcgcttatgcggcggagcatgatgacttgtccggtcccatgaatgtgacatcgccgaaccccgtggaaatgaagcaattcggaaaaatgatcgcaagcgtcctgcaccgcccccattggattcccgtaccggaactttttctggagaaggccttgggagaaatgagcctgctgatcgtaaaaggccagcgcgccctgcctaagcaggcgctgacatccggttttcaatttacgtatgaagaacttgattccgctttaaaggatctcttatctgcataaaaacggaaataaaagccaatcctattggtattctgttttgaaggagggtcttcttttatggaaaagaagcgcgaaaaacatcagcagggagccaatctgaaaaaaatgcaggaagtcctttattccggtgaattcaaaaaagcggaaagagcagccaaacggaagtaaactgaataaagatcggaaccgggcagatactatgtttgtttgatatcacttttttcagggggcgattgatatgggcagaaatcatactcacaaaaaccgtgataaaaacaaacaaaaacttcctcaagttccggatgctttgaaacgcgaaacagacggcacatatgaggaatattcaagcgagcttgctgattccgctgaccgcgaagcgcaggcgcggatgaaagccgctgacaacagagctaaaagcaaaacccgctaatacgaaatccccgcctctgtatagagacggggattttttttacagttcggtaaacaggctttttgccggcgtccgttctttcgccttaggctgttcatccggatagcccgtttgaatgatggcggcaaagcgctcattgtcagcaaggccgaagtcttggtgcaactgtttgtcatacatgatacggccgcttttccagaccatgccgatgccgttttcatgtgcgagaagctgaaggttttgaatcatgccgctcagcgccgcaaaatcatcgtttctcgtaaattcattttcatcttctttaaagacgaccagcaaaaatcccggaacggcgctgagattttttctcatgttccgctctttttcctcgttgaaatcatcttttatctttttgaaaaatgagacgtagctgtccgcaagctttgcttttcccgcttcgcttgctgcgtagataaaacgccatggctccgtcagcctgtggttcggtgcgtaaacggcggtttcaagcatatctaatatgacttcagaaggtacggtttccggtttaaacgaccggatggatcttctgtttctgattgtatgtgcaagactttcgttttgctgtaattgttcggttttcggcatgccgattcaccttcctatccaaatgaaaatgattatcatttataatataacggatacgaccggcttttgtaaaccgttacggaagctgaaaattgattgtttcggcatacacggccgttcccgtcatcttgatgttcatctctccgttttcctccgcgatcctgatttccacttttccgtctttcccgatttcctggccttgttcaattgtgaggcattcggcttcggagcctccgtattgccgcatataggctgccatgacgcctgaagcggttcccgtgacgggatcttcggtcgttccggagaaaggggaagaaaaatggcgtccgtgcagatcactttccggatgaacggtttccagagaaaacggatgaacgctcgctttcggaagatcgcgcaaaacagcggggaattgtgcgttgtccggcaccatattccgtgatgctttaagtgatctcagcggaacaatcagtgtccagatccccgttgatccgtaaacaatcggcagcccgctgtgaaaatcctcagccgtaatcccgagcgaggccgcaagcttttctttgtcgcccgtaaacggcagaaattgcgggggagcctgttcgagtgtgatgtatacccggccgtttcgttcagcggcttttgcgggaagaatgccggcttttgtttcaatttgatatgtctgatcagcctgaagccttcccttttcaattaatgcgtaaagagaggcgacggtagcatgtccgcataaattcatttcatggccgggtgtaaaatagcggatgcgcagatcggcttctccgcttttacagagaaatgaggtttcgttgtaccctgccatttcggcgatcatctgcatctctacatctgaataatcatctccgttaaagacgattcccgcgggatttcccaaatccggaatattggaaaacgcttcatatttaaacacggttgcctgtttcattcatcagccttcctttcaccttatgatcatgttattcagtataacagagtaaaattagaatttttagttaattattcaaaaaaaaagacgccttttaccggcgtctttttttggtttgtccgatcaggcgggtgacgaggatcatcgtgacggacagcgatctgtttttgcggtacgccaagtatttcccgcgccactccggtttgtatttttctttaaaggcccgcagcccgctgaagctgtacatataccggacgttgttgaagatgacggccgcgattctttccgaccagaaagatgtaaaagccgttcctacgtttgacaaaggcgccatgcccatattgaaggtggtatagcctttttcctgcgcccagagaaacagacggatgaaaagcgcgtccataataccgttcggcgcgcttttccgataacgcatcaagtcgacggatacctcgccttcctgatacatcggcatcaggttggcaaaagcgatgatctccccttcctcgtctttcacgtaagcaaccggcgcctgttccaaataatcccggtcgaagaaaccgagagaaaaacctttctcttttttcggtccgagccattcgtccgaaatgtctttcagcttggcgataaactcggaggaaaacggcggttccccgacatgaaatgtgtagccttcgcggtcaaatttgttgttaatcgcccgcagccccgcttttttcttacctgagagcgtaaaggcctccatatccacgaacgcttcttctccaagcttgaagaagttatagccgaagtcatggtacagcgccagatcttcacgttcgatctgataaaacatgacactcagcccctgcttatgcgcttcattcagaaattcctcaatcacaagcggaaaagagtctctctgtcctgacggatccccgagcacgacaagccttctggaaatctggctgaacaataaaagcgctttgccgtcgcttgagaaataaaaccgcttatccccgagaaagccgagatggctgagcgcatttccgccttcttccgccaaaaaggacttcagccgttcaggatcggcctcttctccgatcggcttcgatcttttatgataaaagaacgtaaacaaaaggaaaaacagcggcacaacaataatagccgtcatcgtggcatatgtaatgtgcgaattgttatgaacgaaatagtcgtggcgcaagagccgattcattttatcccaaataaagccggcaatgagattgtagttaaacaaggcgataataaacagagcggccgcaaaaatcatctggccgagcgtatacgaagcctgctctctgataaactgccgctttaacagcacaagcaatacgatgacgacaggcagaataaagatcgcgctgatgttcaatccttttaagaaactgaacacaaaaccgccgaccagcgcggcaaccgccattgaataagaacgtttcgtccgtttgtataattcaatcggcaagattaaaagaatcaaagccgcgcttaacgataacgcgttaaacgcaaggagcgccgggcgcggaatatgcgggatgaccgtctccctgtcaatcggcagggcgacggacgccagcacgacgactcccgccatgaaaaccaaaagcgacagcgaaccgtaaagtaccctgattaagatagcgcgctggaatacgagaagcacgttcgtcgtttccacagcaggcgccatcttcggatttgattccagccgtttaagcgtattttccgttaaatcgccagccgcaaagaacagcccgaacacaaacggaataaatgaatacacaatccggtagatgacgatggatgtcacaaccgcctcctgcggaaagcccatattctgcatgccgagcagaaacagaaggtcaaacgaaccgaatcctcccggcacaagactgatgattcccccgatagcggcaatggcaaatacaccgaacacatggcggacatccgcgtgaattcccatgacatacagggaataatacatgacgacagccgccgcaaaccattcggcaaacgatgccccgatgtaagaaaaaaccggatgcctcggttttgcttcaccgtcttctgcgccagcttttttattgttgatcccagcggcgattaaggctgccggcacaataagcgccactccggcgataacagcccacagccacggtttctcacctgtaatctctccaaccggcagaacccgggcgatggtcaggatactgaagacggacagcccgagcagcgctgaggacgtaagccaggcgatgcctgcgacgaggcgttttacgtcattcgtatgttctttgtatagcatcgtccgcagcccgacacccgccagaccgccgaatccaaggacattgttaaaggaattggcgataaaagagaccctgaatactttccaattcggaatgttgaggcgaagcgtccgtttcagcacaaagtcataaaaggacatcgcgctgacggcaagaaggccgagcagaacgagaataaataaatcgtaacgctcaatcccgttaataatgtacagcgttcgtttgaaagaaaggtctgtcaattcctttttggactgataaatgactaaaagcaaaactgcaataggaaataatacttttaatatcgataaggcattctttttagtcagcaatgttctctccaatcatcataaaataacttatttattttaattcccccaataatctccaacatattatacactaccacctcacattcaaacaaaactcgtctgcaactttctttctctgattaaaatcagtaatatggtatgcaggagtataaatgaggaagtgagacgatggattataatctgcatgatacaacagtattaagcggcgatattttttctcctgaggaacgggatatttgggtgctgtacatgaaagtgatgacatcggcggggctcggcgatgtatcggagtggatgaagcttgatatgagcatgccgcaaatgaaagtgctgatgcttctgaacaaccacgggacgcttaaggtgagtgacatagcggagaaaatgggcgcttccctttcaaatacgacggggctgcttgaccgtttagaaaaatcatgtttcattacacgcgctccgtcagaagaagaccgccgttcagtcgtcgttcaattaacggaaaacgcgaaagatattttccgcagcctttatcaaaaaggacatgtaaaattgaagcgttcattggaaacactgaccgctgaagaaaaacaaacggtcaatcaagggcttgccattttggcaagagcgcttgattcttccaaacagggatagaggtgaaaaaggcctgccggtatcggcggcctttttttgtttgacatttaattcacttgaagtgaataatatattcgaagtgaattaaaaacaggaggattgatcagtatgccggagccattgcaaacagaaaaaaaccagagccgggccatcactctctttacgatcggtgtgttcatggcggcgctggacaacggaattatttccgctgctctgacgacgattaacagctcttttgatgtttctccttcatggggatcgtggggagtgaccctttacacattgggactcagtgtcagtgtgccgattgtcggcaagctgtcggaccgatacgggcggaaaaagctgtttatgattgaagtcgggctgttcggactcggctctttgcttgtcgcactcagtcagagcttcccgatgtttttggcggcacggctcattcaggcgcttggcggcggcggaatttttattatcgggagttcgcatgtgctggccgtgcttccgaaggagaaacaagggaaagctctcgggcttttaggggcgatgaacggtatggcggccgtcctcggaccgaatatcgggagctttttgcttgatgtaaccggatcgtggcattggctgttcttgattaatctgccgattgccgccgcattggttgtgtgcggcggtttgtttatcgctgaaacgaaagagcctgaggcgaaacggcttgacctcgccggcacaatgctgctgtctcttgcgatcttatcttgcatgatcggtatcacgaatctcgatggggcgaagctatcagaaagcataatgaacgtaaaggtgtacggttatcttttgggagctgcacttctctttctggtgctgcttaaggtcgaaaagcgggttgaaaaccgagggggcgatccgattctcgcctactcgctgctgcaaaataaagtgtttcaatggacgctcgtcatcggatttttatcgggagggctgctcgctgcggtcatttttattccttcttatgcggagcaatatttgcacgtatcggcggagaaagcgggttattggatgacgccgctcgcgttggcgtcaggaatcggagcgtggctcggcggggcgatcacggataaaaaagggccggtcttctccgcggttgtatcaggcgccatcgcatttgcaggcttcatcctgtttccgttatgggtgacggataaatgggaatttgtcacagcgagtgtcattgcggggatcggtttcggatttctgctcggggctccgctgaatgtgcttgtatcagaaacggcgggccaaaacaaaggaacagcgctcggcacgctgtcactcgtaaggcaggtcgggctgacgctcgctccggctttatatgccggcttcattacagcgggctttgaccggatcggagatgacatcaaaaaccgtttagcgaaaagcggcattcccgctgatcaggcgcaaacgccggatatcggcggcggactttcttcgttgcaggagcaggtaagccgaatccccgttcccgctgtcaaaaaagcggtttctgatgcgattgaagcgggcattgccagcggctaccaccatctttatacggcagccgccgtcatttcattatgcacgattgtatctgcggctgttttggcgtttttccgaaagccggcatcctctaagacagatgccagcccatcctccgggaaagctcagtaatatgagcgatgtgatgttcagagtgccagacatatagttcgagcgcttgttccagcgtaaccgtctctttagatacaggatggaagtatgtccgtttgaattgggcttccgtcatggagcgcaaaagagcggcccatcttctgtgcaggatcgctaacagctcaagcgcatccccgcaagcggcggttttggaatcatgaagatcggcccagcctttttcatcataaggacggatttccggttcattctccgttaagctcaatttaaaccgggtatagccgttcatgtggctgtccgccagatggtgaaccacttggcggacagtccatcccccttcgcggtacggcgtatcaagctgactgtccgacatcgctctgacagcttgtttcagtttggccggagcgtgttcgagcgcattgatccattcttgtttctgtccggccgaaatcgattcagccggctgatattctccaatcggatagctgagagtttgtttttccatttttgtctctctcccgttgctcgtattatgaaagtataatggtgatgtcacagccttccgctttcgcttcacgaaagacctgaagcacactctcggcgccattttctgtaagctgcttgctttgttcaaactgtctccattctaaaacgagggggtattccacccagccggtcagacaatcccataaagcgtcaaggttttcaccgtagtattcaggaagggcaagttcctttttcaatgtctggtgcaggtcgctcatacttctgatttgctccccgttaataactgctttattcatgcgcggctcctttcccatgtttttattctatcagtttaccattttcctcttcagaagtgaccggagtctgccgcggttccagctggacaatgccttgcccgccgtcaacggccaccctgtcccccgttttcagttttgacgttgcatttccgcacccgacaacggcaggaatccccagttcccgggcaacgattgccgcgtgggacaaaggggcgccgacgtctgttatgatagcggccgctcttggaaaaagcggggtccagcctacattggttgtcgacgtcactaaaatttcccccgccgcaaaagaatccccgtcttccggagcatcaagaacacggacaatgccctccactctcccggccgctcccgcgaaaccttttaaagtgtgcgcatcatcagcttccgcaggcataaaagcatcgtaataatccgctcttctgtcaggattttcagcccatttaaacggattgaatcttccgttaataacggatgggaacggcggcagttttttataggtttcatagttttgctttctcgcttgaatcgacgcaaccgccggctctttccccgcgagcagatcggttatttcatgcagatacaggaagaaaatatcgtccttcatgccggtcatttccgccgctctgagcgcgaatgctctggctgtccggtacaccctgacaaattctgatctggttgtttctctcatattcgcgtattctgacgctttttccattttggctttgagccatttgaccttatgaggaaacttttcttcaaatcttcggaaggcctgttcatgcgcccgctgctgtttcaaaagcagttgttcggcatcaatacccgactccttgtgttctttgatctgcttcgtcagccaatcccggttttctcccggatgcggtatggaaagttcgtattcatgcggacctcggtggccttggttcctgagatattcttcctcgctcatacggccttttatgacttgatcaatgccgataatcggctccaggctggccagtccgccttttcccctcagattggacagcaggagattcgcatcttctatccctgcgagttttgttaattgagaggttaacgacgaagaggattgcgcagaatcacgcccgccggatattagcgcaaaccacgcgttgcataaatacggatagatctcatcattccatatcgctaataatgcccgctccgtttcggcacgtttcagcttttcctcaatattccggcaccactccggcgattcgtccaagtaggaggacatgttttttttcgcgagcttcattttcgacagatacggtttcagttttttcgagatgatcttcaaaagttcatactttgagaacggatataaaggaatcttcatttccgccgggatttctcccaatgtatcgctcatcatttttcctatttttccgcctttcggattcagaccgaaagcggcgagaacggaaagaggctggctcatattgttataggctctgccgcaaatattgccggaccagacataatagcccggaatgatgcccgactcttcatccagattccggaggagcgaccatgtcagcggcgtcatcacatcgggaatcgcttctcctatatttgtgtttgtccataaaaaatcaccgctgaaagaatcattccattcataggtttccagatttccggcctgtaaggtcgtaatcgggcgggattgtagaatatacaatgtcccgcccgcggcggcccattcaatatcctgcggccctccaagatctttttccagctttttcgccagtttatagagctttgacgcatatttgcgaaattccccggggccgtcatattttttcttaggccgtgccagtttaaaagaataggcatcggcttccccggaaacgagctgctccccgagaccgtagacgtaattgcctgtcatctcccgcctgctccccgtaatcggatctgcggtaaacagcactccggatatctcagacggtatcatcagctggatgacgattgcgatttcatgctcatcttccattccctgaacggcgctatacgcttttaccctttctgactgtgccgatcggcggacttcatcaatcgccctggacatgtcttgatctgttttgacattcaacaccgtatcgaattctccggcgaaggaagcctgagcggaatcctcgctcagcgcggatgatcgtacggcaaacaacgcagatgcatggcggctgcggatggatttcacatattgatcaatagcctctctcgcctgatggcgcagctgtccgtcctgaaaggcagacggcaaaatcacaaacccttcaggcacaggatacccgctttgatacattttagagagaatgcttccttttcctcccgcaaaggaataaagttcgtccggaagttctccgaatgttttgacacagtcattcataatgtccccgctcctttttagtcgttcatccaagctcacagtttttctctttttcactttttttgaaagtatttcctataagtatacaatatatcggtcttcacaagggagaaaatcgatggcgttatgttgtcataaatgcatccgtcaaaacggccgcagcggggtcttcagccttacagtgaaagcgctattaaaattagagataggcggcccgatactgcttgcctggcattcgcttccggcttgccgcggagggtttcgtttgcaggttatgtacaacttccgtatcaaaaaaggcggctgaaaacgccgcctttttttcagactgtgcggccttgatgcgccgccgtatttcttttggtccgcttcggctgatacactttcccgacaaacaggtatccgtatctgaaatggttgcacacccaagatacgaaaatgggaccgagcgtgcagatcaaaaataaaagaaggatggcagccgctaaaggcattgatcgcaaatagccttccagaagatatccgctgattaaaaagtaggagtgcagcagatagattgaaaacgaatagttgctgatcattatcacaatcgcgggcacttttttgagctttgaaaacagatgaaaacacagaaagatcatactgaccgcgtaaatcataatatccggacgcttagaggaaatggagccgccgctgatatatgaaacggccacaatcaatattgccgatacggccgcactgaagtaaaccgcataacggtactgattgatgagcgataaaaaacgcggatattcctttccgcaataaaatgccagacagaaataaaacacccagcccggaaacggaacccaaaagaacggaaaaatagaatcaagccccgatgataccggcggatgaaagatggaaaagtaagccagatagacggcgttgatgataaacgaaacagacagcacccacatgggagatttgttgttcagccagcggtgcagcagcatatggagaatgtaaaattgaaagatcacaagaatgaagtagccgatgaagtttcctaaaaacacattctctaaaaatttaccgatcactgaaacgaatccggctccttcttccgccacgcttttcattaaaatggcatccaccgcggcaataaacagaaacggcacgaaaatgactttgccccttttctttaaaaaacccgcgggaacgcctcccgggtatgacctggcaagcagaaattccgaaataaagataaacgccggcgtgctgaacatcaacagggtccgaaaagcatcaaccgtatgggcggcactggctaaggactcttcctgaatcatcagcaccattgaaactgcgtgaagcagaaccacacttaaacaggacaggcagcgaatcacgaaaatttcttttatctgcatgcggccgctcctttttcacaagcgcgccggactttagcgtatgcttggcgcagccatttttcccgcagctcgggtgtgctcgttttgacgacagaaaaaaggttccgctcggctttttgaatgccgcaaaattgcagaatgccttttttcagcgtaatccagtccgagtttttccggaaccactttaagtaccagcccggggaatccgccgtataaaagacctgtgccgtctctgcccggagcagtccttttacgcggcctttttcatatgtgtaggcttctccagcgacaagcactctgtcaaaaaagcctttcataatcgccggaacgcctccccaccacagcgggtagatgaaaatgagatgatccgcttctttcatcagtttccggtatttcttcgtttcagcgtcccggttcatgtcagagcgctttttttcgccgccgtacttcagcacgggatcaaattggtcggcgtataagtcaatgaccgtatagctttggccgctgtcctttaaagccatgacgacgtattttacgagagccgcattgaaactgttctcatccgggtttgcatacacaatcaccgtcttcatatgtccctcccattatttcttaatttttacaatgattatatcatgatgtcatatgaatgaggcaaagacatgagaaaggctttttccagttctgctgccgtttcgataacccctttctgcatatttttgctgattttgccgccgcggattcaatgacaagcatccggcacttctgcgtttttgagcggccgtatggtatactagctgtcaaatgaatggcttggaggacaacatgagaattttaaagtacgcgattttagggcttttgcgaaaaggcgaattgagcggatatgatatatcgagctattttaaggaagagctcggccagttttggagcgcaaagcacagccagatttatccggaattaaaaaaactgacggctgagggatttattacgtttcgcactgcgattcaaggaacaaagcttgagaaaaaaatgtacacgctgactgacaagggagagctggagcttgctgcctggctgacgaaaaaagacccgattcctgaaacggtgaaggatgaatttatgctgaaggcttatttcatctcagctttgacgcaggaagaagcggatgagctattcaccgatcagctcgtaaagcggaaggagaaattgtccgatctggaaaacagttatcaagaactgatgacatcgtccgcggaggcggattcattttcttctcctgatttcggccattatctcgtgctgacaaaagcgcttgagcgggaacggaattatatttcctggcttgaagatattttggctctcatcaaaaaagcataaacaaaacggggcggctctgtatctgcaagccgcctgtttacgttctgagaaccgcattgataaacgaatcagccattaaaataagaaaaagcagactgaaatacacaatcgaataaaaaaacatccccttcgaccattgcgtgtcatccgccgcctgaaagcctttgacgctccggtacagccagatggctccgagcaggagagcggacgcggtataaaacaggctgacgtctatataaaaaggaacgagcagcgaaaccgcagtcagaacggcaatatagcgcagcatttttatttttgtggcgcggttgccttttatgatcggcaaaagcggaatgccggcggcacgatactcttcctttcgcctgattccgatcgcccagaaatgcggcggctgccacaaaaacataatcgcgtataacaaaatcgcgggcatatcaatgtacccggtgagcgcgcaataaccgattaaaggcggagccgccccgggaaagctgccgacaaatgtgctccagacggattgtcttttaaaccaaagcgtataaacgacggcatacagcaaaaaggcaagcaggccaagaacggcggtcagtacattaagcgaaacaagcatgatgaatccgcatgcgccgagacatgtgccgtacaggatcatgaccggcggcggtattctccccgtgacgctggcgcgggtgcgggttcgcgccatctttgcgtccatgccgcggtcaaaaaagttattaaaaacagtgcttgatgccatgactaacgccgttccgatcatggcaaccgccatggcggcaaatataccgggccctccgcccgtcctttctgactgaatccatgcgatccaaaatccgcccaatgcggcgagtgaatttgagatgataatccccggtttggcaagaatgataaagtccttgaccgtcatccggtttccgttatgcttcagcggctgttccgtctgtgctgcatttgagttcatttgttcaggttctcctttttcggcttatcatatcaggaagaatcaggaagcgcaatttattttgggcatttttcacacaattgtaaattgtgtatgaaaagccgcatcttgtgaccggatgcggcttttgcctttttctattcaaatcctgtccatacagctttttcaatccagcggatgctctgagctcgggccggcgatggcggctccacgcgtcatttttgcgactgagatgttcgctctcttcagtcactcaaaagccgtgtggatattccaaatcgacgttcttctttcccgagccttttcaagaaaacttcagaaaaatagaaaaccttgccgattagacggcaaggtttgtttcttacagtgtaaatgcgatatccgcccctgatacagggtctttgacgaatacgccctcttctttttcttcgatctcaaagccggcatcggtcagcgcttttgtcacacgtgacagctctttttgatgcggcagcgcgatggtgtaataatccagcccgcttgcatttcccggtttcggcggcgcatgttttccggcccatatattcagaccgatgtgatggtgataccctcccgctgaaacaaacagagcggacatggcggcgtaattgccgacaatgtcaaaaccgaggatatcggtgtaaaacgctttggcttcctgtaagtccgtcacatgaagatggatgtggccgataacagttccttctggaagacggcttttccgttcagctccggcttcttccaaaagcccgtccacatcgacgggcgccgtttgcatgacataattgccctctgcatcccggcgccacgtgctgcggggacgatcggcgtatatttcaataccgttgccgtccggatcagacaggtaaagagcctcactgaccgcgtgatccccctgaccgagcgcgatgccgttttcaatcagcctggccaatgcgatgccgagttctttccggtcaggcagaagtatcgcgaaatggtaaaggccggtgacagaccgctccggcagaacgacggcgcttggattttcttcaagcaccagcaggacgcgttttccgtctgctgacagtcttgctgaacgatctgtctgcgagatgacttgaaggccgattacattccggtaaaagccgagcgagcgttccatatttttaatggtcaatttgacataaccgattgccgtatcttgatgaatgccggtcatttgaacgccttctttcttatgctgaaaaagtttctcccttttttgatttgaaaaggagctgatccaatgaaagcagacggcttcctgaaagcgctaagtgaattgacgcaaccagtaagatgaaatcaaattccgatccgcccataaatggtgaggaaagcttcgccgtgaagatggcgccgactaatgtgacggcaaacagaacgccgataatgcgcgttgccaaaccgaaaaagatcagaaccccgccgacaagctcaatcgtcgcgatgacatagaccataaaggccggaatcccgatgctctggaaaaattgcgtagttccttccaacccttgaaacttggataaaccgtgaacaaaaaagataatacctgttacaacccttaaaagcagtgttcctgtttcgaatgatttattcataaaatcctccttgaaaattattatcacttactttatgtaagctagtatatatacataacttatttacgtcaagtaattttgttacatttaacgaaaataacttaaaagtactatttgccttcgcgaaaaaaagacctccgcactctgtcggaggtctttttccctatctataattcccggaactggctttcatataattcccggtaaaacccgttctggctgagaagttcggcatgggttcctttttcagccatttcgccgtctttcagcacaagaatctgatccgctttttgaatcgtgttcagcctgtgagcgatgatgacgcttgttctgcccgccattaaacggccgagcgcttcttgtattttcacttcggtcactgtgtcaatgttgctcgtcgcttcatccaaaatgagcagcaccgggtctgccagcacagctctcgcgatggaaatgagctgtttttgtccttggctgatgcccgcgccgttttgggtaagaacagtatcatagcctttcgggagccgttcgatgaacccgtgggcattggcggcttttgcggcttcctccacctctttgtcagaagcatccagacggccgtagcgaatattttccctgatggtgccctgaaagagaaaggaatcctgcaggacaaaccccatgttttttctcagactggatctcgtcagttttttgatgtccgttccgtcaatgaggatttttccattattcggctcgtaaaaacgggcgatcaggctcgtaatggttgttttacccgctccggtcggtccgacgaaggcgatggactgtcctttcggaacgctgaaggacaggtgttttaagatcgggctgtcttcctgatagccgaaggagacatctcggaattcaatctctcccgttttgatcggctggtacagcgcatgctcttcatcttcccgctcctctttttcatccagcacgtcaaacacccgttcagccccggcgatggccgataacatcgtattgaactgattggctaaatcatttaaagggcgcgtgaactgccgcgaatattcggcgaatacgacgatggaaccgattgaaatccaccccttcagcgcaaacagcccgccgaccgccgctataatcgtaaagcttaaattgtttaaagagttcatgactttcggaatgaatcccgaaatcgtctgcgcccaaaaccccgatgattgtaacgccgcgtttttttctaaaaattgttccatgacgcggtcttccctcgaataggctttaatgaccttcgcccctgatatcgactcttcaataaaaccgttcagctcgccgaggtttttctgctgctgtttaaacagcaatcccgtccggttggtgatccatttaatgctcaaaagcatgatcggaataatcaaaagcgtgatcaatgttaaaagcggactcatgtacagcatgacggcgattgtgccgacgaatgtaatgacgctcgacagcacttgaatgacggatgaatttaaagtggagctgacattttcgatatcattggtgacccggctcattaagtccccgagccgctgtttatcaaaaaacggaatcggcagctcatgcagatgggtaaacagctcgctccgcattttaaacacggtgctttgcgagatattgatcatccaatagttttgaaaccataaggacaatgattgcacgaggtaaatcccaaacaggatgaacagcacccccgccaatccgtctgtcgtctggccgacgataaaatgatcaatcgctttcccgatgacgaacggtccgagcaggccgaatatggcgcttatgactaccatgatgatcacaagggttaaaagcccttttttctcggctacataagaccagattctgcgcagcgtgccttttgtatcttttgctttcgcgcgttttctgccgccttcatttgatttgagcggtattttcggatatcggaaaggtttacgaatgtctttttgcattgtcagctccctcctttccgaattgtgattcataaatctgccggtacaaatgagactgtgccatcagctctttgtgcgtgcctttggccagcagttcgccgtcttcaagcaataatatggtgtcagccttcatcgcagtcgttattttctgcgtaataatcagtgtcgtgcattcataggatctgatcgcttgtaaaagcttcgcttccgtttgaagatcaagcgcgctcgtactgtcatctaacagcaggagggacggctttctgataaaagcgcgcgcgatggaaatccgctgcttctgcccgcctgacaaattgacgccccgctgtcccagcaccgtgtcgtatccgtttgacagcttcataatcgtgtcatggatttgcgcgtctttggccgcctccattacttcatctagtgaagcatcctcccgcccccaggcgatattttcacggatggtgcccgaaaacagaagcacttcctgcggaacatagccgatttccctgcgcagcccgcaagcggagaattcaccgatcggtttgccgtctatgaaaatactgcccgaatcagccgtgtacaggcgcggaatcagctgaaaaagcgttgattttcctgaacctgtcgcgcccataatggcaaccgtttctttcgggctggcagaaaaggacacgtgatgcagcgcgtctttttccatgcccggatagcggaaggacacttcgcgaaactcaatcccgcctgcaagcgcccgtgccgggtcctgccccgttccctcgccgccttctgtttccagcacctcgccgattctttctccggaagccttcgcccgggaaaataccatgataagaaaaggaaggacggacagcgcgcctgtaatccgcgtcgcatagttaatgacggaaacgacatcgccgacctgcgctccgccctgagcaatgcttttggcgccgaaccataagataaacaaaatgcaaatgttcatcagcagcattaaaatcggcatcgccgcttccacgagacgaaaagcggagaccgttttttccatcagcttcgtattcgatttcaaaaaacgtttcacttcgtggtttgcacggaggagcgctttaatcagtttgatcgccgtcaggttttcctgcatgatcgtgttgacctgatcaagccgcttttgcacagaccgaaacagcgcgccgcctcttttcagcacccacagcaaaaacaaaagcaaaatcggcaccgtgatcagcagaaaaaacccgagtttcgcattgacggtcagcgagagaataatgccccccgcaatcattaacggcgcccggagcataaaccggagactcatgaaaagcatattctgaacctgtgtcacatcgtttgtcagccgggtgataaacgatgtggatgagaattgcgcaaatgtcgaataggagaaggattgaattttttgaaaaagcccttttcgcgtatcatacgcatagctctggctgatgtgggcggagtagaatgaatttaaaatgcccgatgcgaatgaaacagcggtcagtccgatcatcacgccgccccacagccaaaccgttccgagatcctgctttaaaattccttcgtcaatgattttcccgatcagcaggggctgtatcagctctaccgcaagctcgatgagcatgaaaaacagagcgattcccgccaaaagagaatacggttttacatatgataaagcctttgacatgtgtaagcctccaaatcctttgttcaatatgtatgtatatttattttatttgtttgtcttaaatgaataaaggattaacccttgaactcccacttttattatgtattttgtgtaaaaaaagcggaaatcattgaggataaaaattgagggaatgaagcgtgcagatatatggaggctgtcttatcttttctttttaccagctcctgaaccggagccttttattttaaaatgactagcggagcctttaacagacgtccgctagtcagatgatcattcataccgtgtcatttcatctaacgaataaaaacgagagcgaccccgaatcctttatcagcatcaaactcattgatcactttcatgacctgccagcgctggtttggagcatcagattttgttgcaatcccgttatgagcgtgaataaaatctcccggtttcacagtctcatcgcatctgacatatacctggccgatgagtccgacaatgttccactcgtctctctcttctcttgaagcgtagtcttcttcaggccgaaagtccggattttcctttggcgccatgaccgtatggccgttcgcatctttctgttcttcataaacatagccgccaaattcattctttacgtatcgtcccgaccagtgaaaactcgactcgccaagaatcactccggcggtctcggaaatgaccccaagcatgaggtcacctttttcagccggtctgatcttatcaccttcaagtgtgacaagtgttcccgtcggaatcttttcccctctcaggctttcaaaatactcggcgtagtcagagaatgtcgaggaacctgttacgcctcccgtagccttaattgttccttcttttgcgtgaagctcaatctttctgttggctgatgacggagtgctgccggcaccccagccccatacagttgagttcgcatttgggttaatcgtattgtatgaaccgattactccagattgagaacctcctgcagcctgtccccggacagaaccgacgacaaagccattagttcctgtaacatgggaatctttagatgccataacagaagatcctttatgtttaaacaactcatacggtgtttttttaccgcctacatgaaatgttgtttcatatccttgaaaatcaatatttgatatattcagatccggacccgaagaatagagtccgaccgttccgctgccggctcccaatctatgcccgtatacattgctcactgtacaattatcaacgcctccgccaaaagcaagccccgtcgtgccgccgtcaactagaaaaacgccgtcaatcatgcacttacctaccgcattttctccgccaagaacatacagatcatgagcagcggagcggaacccgcggatcgtaatattcttcagattgacataccgccctttgtaataaatcataatgatcgtgtcattgctgtaatcgtatgaacgatcttcacaaatagcttggaaattcactatattaactgaatcatagcccgaaacaaccaacgcactcgctccgacgcctttatatatagaattttgtttaggatttgttgcctgacaatttactaattggacatcatgggcagtttttgatgtcggctcagccgataaatgatggccaatatgtctaatgcaaaaaccgatcgcattttcgtaagcacggcaattagccagttgaactcgtttagccgccggtgcatagtcatgcgccttaatttcaaaaccgcgtgcaccgccaattgcaacacagctatctacaaatacatcttgagaaccgtcatcgatctcaaagcaatttgaatttgacgtgccattcccatttcccatcgggtgataggaaacacagtggctgaaagtagtgtggaatccaaaatgacaagtaaagttatcatccccggaccctgttgcttcacaatgtgaaaacgttacaaagttacagccgttgggctgataataagttggatcatctttttctccatgtctgttatagttagggcttgtagaatcaaagccgtgcaggccggcgttcttcgcaaacacatgctcgacaaaagaatagtcaacattcgcaaaaagcaaacagcttgaagtggggcctttcggaatcttccagccggcaggacgcgtatccttgttccaatccaaagtgagatggccgacataaatattttcattaccgttcgtataatcactgttggtcagaacagaatggccgaccggtgtttcgtctaataatttaatgaccgttcttttcttgcctgctccgacaagcattgtatttgaaggaacaaacaatcccgatgttctgaatacacccgcgggaactgttacgacataacctccgtcggccatggcatcatgaaatgcctgcgtatcatccgttacgccgtcacctttagctccaaaatccataacgttccgctctgtcacatgttcaaatctgttttcatacattttaagtctttcgtttaaattttcataagttgacgtgccattgctaagcgcagcaccgattttgctgtcaatcgcttcaaagttttgagcaatgctttcaacctcaatcccctccgttttatcgggtttgtaaagtcctaagaaagtcgtatagtttgtcattgccttgcctcctatttgttaattgttatataaaaataccgcagaagtcatttcgttttttgcaccccctcattttcactcctgcatgtacaggtggcaaaggtatgacaaattcatacattttttcaaaacataaaaagagcgccggattaacaagcgctctgcacatagtctgctgctgcagtattttaaccgttcaatattttctcgacacgctcccgcatttgcggaacgcctaatccgacaatgacctgaagcgccctgccttttctgacgacgccgtgggctcccagctctctgaaatcggcgtcacttttgacctttgattcatcagcgacagtgacgcggagacgggtggcgcagttggtgacctccgtaatattgtcctttccgcccagcgcttcaatatacaaagcggctgtatcccgctgtgtttcgtctgccgccgctgtttcttttgaagcctgcttccgttctctgtactcctttttcgaatagagctttgtttcctgcccctcctctttttctctgcccggtgtggcgatgttgaatttgagaatgaggaaacggaagacgaaaaagtaaacagcggtaaaacacaacccgatgatgatctggtatacatacgtcaagccgtggcttgacgccagcgggatccagttcaaggtcgcagcttcgatcaaaccgcctcccatatttccgacgacgccggccatatacatgacggttgccatggaagcggcaagcaaagcatgaaccgcaaataaaaacggcgagataaaaaggaatgtaaattcaatcggctctgtaattcccgcgacaatggacgtcaaggtgaccgggatcaataggccggcgacgatttttttcttttcctttgaagccgtggcgtaaaaagcgagcgcgattcccggaatgccgaagattttcgagttgccgtgaagcgcgaagcccccctgcgggaacaattctttcagcggtttgacgctttgagagtattccccgagatgctgggcccaataggtgacgataccgccttcagccacagccggaccgtaaataaacggcgagtaaataaaatgatgcaggccggtcggaattaaaatccgctccaggaacgtgtaaatccacacgccgatcgccccggaagaaacgagaaagctttgcagcgagcctattccggactgaaccatcggccatacgtatgccaccgcaagtgaaatcggtatcataatgaagaaagaaatgataacgatgtatgaagatccttgaaaaatccccagaaaatccggcagttttttatcaaaataacgattgtgcaaatacacgacaatagatgaaataaagatggcgccgataatattcgtatcaagcgttttgatcccggcgatcatcgtcagcccgctcgttccgcccgcttcctgagtcatatcgacatgaaaagccccgccccaaaccgtcagaatcgcattgataaagtaattgaatgtcagataaactgtaagcgcttccaaacaggcccgcgcctgcgcttttttcgctaaggcgacaggtatgccgatcgcaaacaggagcggcatttgattaaagacggtccagccgccctgttcaatgacgtaccagcattgataccaaagcccgtcaggatcagccagcggccccatcagcgttttatttttaaacagcgtactcagaccgacaataataccggaaaatgcaaataataaaacaggcacaaacatcgcgctgccgaagcgctggactttttgcatcatttcacgtgacctcccgctatttatcaaaattttcaagctctttataatcaacatatgcacggaataacgcttcgcccaccagaaaaaacggggcgaatgcgacgatttccgttttatcgcttaacgtcaccggcttgctggtcgcataaagattatacggcgtcgtttgcgccagtacgttgtttttcagattggtgattgaaataaacggaactccctttgcggacagggtccttgcctgcggaattaattcgggtgtttcgcctgataaagaaataatgatgaatacgtcatcaaccttaaaatcatcacacatgatatcaaactctgtgatgtcctgaattaaaatcaaatacttccgccgggatacaaacatccgttgcagctcacgggcgcacaccctctgagccgtccccgatccgtaaacgaaaatccgttttgcttcatctatcagccggcacatctccgtcatatcttttgacttcacgtattttacattggcttcaatatcatccagcagcttttcaaacgtcatattctcgccctcttcaggctgatcctcccatttcagaaaaacccggaattcactgtagccgctgaagcccagtttttgggcgagccgcaggatggaagaccgagagacattgcaggctttcgccatgtcattgataccgagatggtagcacgtatgcttatgattcaatatatattttaaaatataaaaatcgttatcatttaatttcgcgtaatgctggttaaccagttcttcaagactcatcccaaaaatccccccgttttctttctattatatagaataacagataaagaaaacggggaagattgtcatcaggaaataggagacggacttacatcaagctcaggccagtagtccttgttagcctccatcagatcttcaagaatcagtcttgccacacgggcgttcggcactgtttttgacaggattagcgcctgccacagcttttgaaatgaccgctcttcccacgcttcagccgtcagtttttcgacagacacctgctgttccatcaggcctttttgaaattgcggtatgttcccgactgagagcggttccggtccgtttgagcctacgagacaaggaatctcaaccatggctgacggatcaaagtttgcgatcgcgccgttattttcaacgattaacagcatcctctctcctgtgttgtaagcgatggcccgggcaaggtcgacgatataggaagcatgatcatcaattttaatttcactgttctccgacgattgttcgcgcgtaatcatatcgcattggctgaaaatgaaagcttcccgcccttccatgacttcgttggctctcgtatggttcggatttgattttttcaccatatcatccgggaataagtaatattgcagatatgtgttcggaagcgtatccggatcagccgcctgtacgtcgcgcgcttttttgaatgtgtcattccagcttgcttcagtctgttcggcctccgtcttcggaacgtagccgtattcacggacatgctctttcagcttcggcattaaatcattgccatgccggtctgtgatggacgtccaccagccaaagtggttcaagccgtagtaacggacgttcatttcttttcgtgaagataatccgaggatgttcgccatacgatcctcaattccgaccggcatgtcgcagatgttcaatattttcgaattcggtctgaggcgccgtgtagcttcggccacaatcgccgccggattggagtaattcagcatccatgcgtcgggcgagtacgtttccatataatcaagaatctccagaacaccgccgatagagcgcatgccgtatgcgattccgcccggcccgcatgtttcctggccgaccacgccgtacttcagcgggatttgttcatcgagcgcgcgcatcgcatattttccgacgcggatatgcgccatgacgaagtcaacatccgtaaaagccgtctctgggtcatcagtcgccagaaattcaatgtccggcgctttttcttttataaatacctcacacgcacccgcaatccgctcctgcctttctttatcattgtcataaagtttcagctttctgatcggaaactcttccaggtgattcaaaagcattaatacaattccgggggtaaatgtgctgccgccgcctgcaataacgattgagaatgatttgtctgtcatgtgaagccctcctctgataacgtttacattttatttatatcatgagaaggtccgatctgtaccgggtttggaggagttagatcatttaatcatttttagttatttttctcaaaaagcgggaaagttcccacaggtacgaaagaggcctgctgtcatcagcagacccattctcaaaaatgctcttgtaaatcagaaagcagcacttcctgctcaaattgcggatttccgatcggaaaaattctggctgtttccttgtcttcgttgacatgctgaatataaatcgggactccttcatatgtcacatacgccatggcggcggattccgaaatgtctttcgcacgctgtgtattcacgtttcaaacctcctttaggcctcacacataacgtgtccggcagccaagagaagtatgcttgtttcttacaattgtccggcggtgagtttgaattttttgaggcgtttgtaaaacgtgctccgcgggattccggccattttggcggccagcgtaacattccccttcgctgattcaagcgcgtttacgatgatgtttttctgaatgtgctcccggatggaggcgggggacgcttcttcctgttcataagactcggccgcctctttaagacctgacgcttcaagcagggctgcgatggggcgccctgacagccgcccgtccgggaacatgacggaaagacgttcaaatacattaaacaattccctgatattccccggccatttccggctctttaataggtctaaaaagtcatcaggaagctccccccgccagccgcgatttcgctgaaattcaaggaagagtccgggaatgtcttcggtgcgttctcttaatggagggagatggatcggacagacgtgaagccggtaaaataaatcttctctcagctttttgcattcgacaagctgtctcagatcagtgtgggtggcagtgatgattctgatgtcgacgggaatctcttttgtcccgccgaccggggtgactttccgttcctgcagcacccgtaacagagcgacctgcatggagtgtgatatttctccgatttcatcgaggaaaagcgtgcctttatcggctttttgcaaagcgccgttatgtcctttccgtttggccccggtgaaggcgccttccgagtagccgaacagttcgctctcaatcagcttttcggggaccgctccgcaattgacggcgataaacgggccgtttttcctggagctgttgttatgaatcgcccgggcggcaacctcctttcccgtcccggtttctcccgtaagacagacggttgcgtccgttcgggcgacaagctccagctgctgaagcatatgtcgggatgacgggcttttgcctgccgcaccatggaatataaaagacggcttttcttctcgtttggataagtaaatgcacgagaagccgttctcctcccgcttcgcctgcttgatgtgaaagccctgttcctcaagctcgcgcagcgtatgtccggtaaaatgctgaacgggacggcttgcggcgataacccggctcatttcattgcaaagcacgatcggatcgtgagaccgggtaagcccggcgaatttgctgatcatgtcaagttctgtcattttgatctttagggcaagctcccgttccgccgtataagcgatggaggaggcaattccgagcataaaaggctgagcgcgggcggcggggcaggaaatatcaatgacacccgccagccgtccgtcttcataacggatcggcgcggcggaacagctccattgatgagaagcgagcgaataatgttcagagccgtgtatcatgaccggctcatttgtataaagagccgtcccgatcgcattcgtgccgacggctgtttccgtccagcgggcgccttttaagaaattgatgcggttcgcttcatgaatggtgcgcgggtggccgtcaactgaatggacaacgccgtctgaatcaatcaggagaaccatcatttccatttcccgcattgccgttttcattctttctgcatgaggcattgaggctgctaaaaataatgaatgcttctcggcctgcctttctaaatgatctgccggcattacattcggccccttttcgagataagggttgacgtcggcttttttgcagcggtgccatgaggccgccacccgcttctgaatacgggattcatcaagcacgccttctttcacaaagcgcttccaggttttaaaatcattccgaatgacattcattgtattcgctcccccctgttcagaccatcttttcatatattgtaggggaaaaataaagcgctttcaacgaaaaataccccttctcatctgagaaagggtattccggttatacggaatgcaccgcaagtccggtgacattcagcagagcttcctgaagcgtttctgacagagtcggatgcgccgcgataaagtgctccgacatatccgccgtcatttcaccgttcatcatcatgaccgcctgaccgatcaattccgtcacgtccggcccgatcattgacacgccgacgatttctccgaattccggttcggcaatgattttcattttgccgccatgctgatgtttaattaacgcttttccgttagcagaaaatgaacattctccgattttcacatctccgtatgtttctctcgcctgtgtttccgtcagcccgacagcggccatttccggcgatgtataaatacagcggggcaccgcccgcatatcgactttgctgtcctttcccgtggcatgcgcggcggctgtgattccttcatgaatggcggcatgcgcgagctgcattcctccggccgcatcgccgcacgcgtatatatgaggcacattggtctgcatatggtcattgacttcaatgccgcgcggagaataccggatgccggcctgctccatattaagctcttgcaaacgcggttttctcccgattgcaaccaaaacgtgatcagcctgagcctcaatttctttgccgtcttttgtccacacggcggttttcctttctttgtcaatccgctgaagggcggctttcgtctgaatatcagccccgctgtctcttaaagagtcttcgaaaacagcggcgatttctccgtcttctgccgggagcagccggtcagccgattcaatcaccgtcactttcgttttaaaccggctgaataaagaggcaaattcacagccgatcacacctcccccgacaataagcagagaagaaggaatttgctgtaaagaaagcgcgtctttgctgtcgatcacccaatcgccgtcaaatggggcaaacggcagctccgccggttcagatccggatgcaatcaatatccgatccgcttccagaatgtcttttgcgcctccttctccttcaactagcaatgtctgctctgtgagaaatgaagctgtcccgctgatgactttaatctgatttgctttcattaagtattgaattccctgcacgagccggctgacgatttgccgtttgcgcccctgcatgcgggcccaattgagtgtaatgttttgcggcagttcgatgccgaatgtatttgcgtgcctgattttatcgagcacattcgcgctttccaaaagcgactttgtcgggatgcacccctcattgagacaagtgcctccgagcggccctttgtcgatcagaacgacttcttctcccctccgcgcggcagtcacggcagctgcatatccggcaggcccgccgccgataatggctagtgtcaatctcttcaccctctctataaaatcaatccggccggctcttcaagcagcgctttgaccgttttcaggaagtccgcagccggtgcgccgtcacatactctgtgatcaaaggtaaggctcagcggcagcatggtgcttttgacaagttcatctcctttaaacgcaggcgtttcatagcttgcgcccactccgagaataccggcttcaggcggattaagaatcggggtgaaatgctcaattccgtaacccccgagatttgtaatagaaaatgtcgatccgtgcagatcatctccggaagcattgccttcccgcgcccggcgtgccgatgtgctgatgtgatccgcaagctcaaggaatgaaagcttttccgcatcccgaatcaccggcacgacgagaccgttttcaagagaaaccgccatcccgaggtggacatatggataggtgatgatccgctcctcttggtaagagctgttcagctcaggatgctgtttcagcgcaagcaccgcggcccgggatacgaaatgtgtgaccgtcagtttaacatcgctccgctttttcgcgctgtcggcgagctgctgctgccattttacaagctccgtaatgtccgctttcatcgtcagcgtcagctgggcgctgttttgcaggcttttgtgcattcggtctgcaatcacttttctcatcgctgaagccggttttccctccggctgtgccgtctgaaccgaagactgcggttcagcttccgtcttcatggccttgatgacgtcagcttttacgattctgcctccgggccccgtcccgttcagcgtatcaactttcaacccggctttctccgccatttttcgggcaacgggagatattttcacgcggtgtttacgcttttgcacggctttgggagcgggaatatgttcaggttcagcttgcggtttccctgcattttcaggagccggcgcctccttctcccgcacttcttcgccgttttccccgatataacagatgggcgttcccggcgggactccttctccctctttgactttaatatgaagaagcgtgccgctttcaggcgcttctatttccatttctattttttccgagttgatgctggcgatgctttctcccttttcaaccgggtcgccgacttttttattccagacggatacttcacctttcttcatcgccattcccagcttcggcattactacttttacagccattctatatccctcctttaattcattgccggctcgccaagcaattcaagcgtgacgctgacaatttggtctggtgtcggtaaatattgatcttcaagcaccggcgaaaacggcaccggtgtatgcggcgctgtaatccgtttaatcggcgcatcaagcaaatcaaagcccttatcggcgacaatcgcagcaatatccgtggcgatgctgcagcgcggattggcttcgtctatgatgatcagccggtttgttttttctaacgatgtgaaaatcgcttcctcatctaaaggagacagactccggggatcaagcacctcggcgtcgatgcctttctcagaaagctgtgcagccgcttcaagcgcggtattgacctgcttgccgaccgcaaacagcgtgatgtcgctgccttcgcgtttgatatccgcttttccgagcgggattgtataataatcttccggcacctcgcccttcatgttgtaggacgttttatcttcaaaaaagaataccggatcattgtcttctattgccgccagcagcaaacctttggcgtcatatggattggacggcacaaccgtcttcagacccgggatgctggtgaacaggccatacagcgcctgcgaatgctgagcggctgcccggaacccggctccgtatgtggtgcggacggtgatcggcacttgcgctttaccgccgaacatatagcggaatttcgccccttggttgatcacctgatcaaagcacgttccgataaaatcgttaaacatcagttccgcaatcggtctcagccccgtggatgccgcagccatggccgcacccatgtagcccgcctcagaaatcggtgtgtccagcaccctgtttctgccgaattcctgtacgagcccctttgtgacccctaatacaccgccccatgcttcatcatcttgcaaatgatcgaccgccgctcctccggcgacatcttcaccgattacaagcacattgtcatcttttctcatcgcaagcttcattgcttcattgatcgcgtccgacatgcttatgactctcgccatctcacattccccctttttcatatgacacgtagacgtctgtcaacagctcagactctttcggatatggactcttttcgctgaacgagacggctttttcaatcgattcgctgacacgctgttcgatgtctgacagtttatttgcatctgtttcttttagaagatagtttttaaagccttgaatggcatccttttcttcaagatgctcagtcttttcatcctttgttttatacgtttgggcatccccttcgaaatgtccgtagtttctgtaagtcatacattcaatcaaagacgggcctccgccgtttcttgctctttctatcgcttccccggctgcctgataaaccgctaaaatatcttttccgtccaccgtgacccccggcatgttgtaggcagccgcccgatcggcgattgaatcacaggctgacgcgtactcaaatgtcgtggcttcgccgtagccgttgttttcggcgatgaacacgacaggaaggttccatactgccgctaagttcagcccttcatggaaagtcccttggttattggctccgtccccaaaaaagcaaacgcttacatttttagtttgtttatatttagccgtgagcgctgatccgcatgcgagcgtgaatccgcccccgacgattccatttgcgcctaacatgcctttatcaagatccgcaatgtgcatagaaccgcctttgcctttacacagtccggtcgcttttccgaatatttccgccatcatgccgtccagatcacagcctttggcgatacaatggccatgtcccctgtgtgtgcttgtaatgctgtcgccatcatctaaatgagcgcacacccccgcagctaccgcttcttcaccggcatacaaatggacgaatccgggaagcactccttgtgcgaaaagttcatgcactttgtcttcaaagcccctgatttccagcatcttttggtacatccacagcgctttctcctcagttaatgacaagccttctcgttttaacaattccattttgtgcgcctccttctatttagggttcacacttataaatgcaagaagcatgccagcctttgaagcccgtaaaatgaatgtttttatttttacaatggagacagtttgagacaggtgtctcattttgtctcgatctgttccctttgtctcgttttatggcatacaaaaaagaccgggcatcaccctgtctttgacaatgatcgacgtatttatttcctcggaaatcttttaactgcttcattcttctgcatacagtctatcgcggcgtttgagtggttacactctttttttcatatccgcgtgctgcagttcatgcttttcttcaacagcccgattcagcgcttgaagcatgtagccaatgcctttatacgatgacaaaggccaggtgatatgctgatgctctccgatgacggcgtttaggacgcttcggtattttttcccgccaagcatgacaagctcctcgatgtcggagaagcctttttcatgaaattgacggcgcagctcgtccgctgccatgatctccggatgaccggttccaaaagtgacatcgtaatttccgggaaccatatcatccggacgaaggaatccgtgcttcgccgacaaaatcacccactcatcgaaaaatgctttcgcatatcgctcgcacgcctgatgaaacgggctgagataagcgtcttccgcccttaccggacctgtatctgaatggacatcccaaatttttttcttgccgcaggggatgatgcatagtcgtttcatttttctctccccctttatgatgtatctcctatcaatgtaccattattcgtttatttctgcatgacgaaactggccatggatctgtctgggtaaaaactgcacacaaaaagacccggaattcaaatcgaaatccgggccggatgaaggttgtttatgtcactcttgctccatcccatcaagatactttctctcaaagtcatcgagcaatgcacgcacttcatctgttgactttgtattcatgcattgatttcttaattcacttgctccccggaatccgcggagatatatcttgaaaaagcgggggagcggtttatatgctcgggcttctgcttttgaatattcatcatgaagatccagatgcaatctcaaaagatcaagcaattccttactgctatgctctctcggctccttttcaaaggcgaatggattagtaaaaatgcctcgtccaatcataatcccgtcaacaccgtattgttcagcgagtttcaagccggtttcacggtcaggaatatccccattgatcgtcaaaagggtatccggcgctatctcatcacgaagtttcttgatttccgggatgagctcccaatgcgcatctactttactcatttccgctcttgtacgcagatgaatggaaagattcgcaatgtcttgtttcagtatgtgtgtcagccagccgcgccattcgtctatgtccgtgtagccaagtctggtcttcacactgaccggcagacctcctgctttcgccgcctgtattaattcggctgcaacttcaggacggcaaatcaggccgcttccctttccattccccgccacattaggtacaggacagcccatattgatatccaggcccttaaaccctaattccgccatcccaatactcatttggcgaaagttttcaggcttatctccccatatgtgggcaaccatcggctgttcatcctccgtgaaagtcaaacggccgcgcacactatccttcccatccgggtgacaatagctttctgagtttgtaaactctgtgaaaaacacatcaggtctgcctgcttcactcacaacatggcgaaaaacgacatccgtcacatcttccattggtgccagtacaaaaaatggccgcggtaattcacgccagaaattatctgtcataacaaatccaaatcctttcatgatgggatacagccaaacctttatcccaaaattaaaaactgaccatgcttcttttacacttatagcatgtgtcagcacttcttatcaaacgatagtaaattttgaacatttcattaacacacataaatggtattaggttgaaacaaatcattcatattacttgcttttgcactaatcaacgtgatcgcctgtcctcttatgtttcattttttaaaatgaaaatctggagagggccgtgcaagaaaaagaccgaagatcgacaatgctcattattactaagaagactctttaatgtatacttatgtctacttaatctattacgcatgctaccttcccccacatatatacaattacgagtttggttttttaaatctgttacataaacacctttcattgatctaaatttttgatcttttagcccattttatatgttcaggcaaaggaatttcaaaattaattgtatgattagcctttcccttaatgaagaattcctatggtaatttgattttcaaatccattatcatctcctccaaaaatccacattataaaaaaattccctatttatctatcaacgcttagcttgcctaacatatatctttaatagtaattacatcttaaaaatagacccaccatttatctctaagtttagctgtaggcataaatttaagcttgcattcaatgagtggagcttaatttttttattctgcaatttttttaatcttttttaatttcatccttctctaaacctaatctttgcaataattctttatcgtattcgataaaatcacctaattgatcattataatatgggtattgaacagttaaatcatttatcgcaaggtttctataattctttttgactcttatatttcccaactctatttgtggaggatttttcaacatattaattagcttttcagatgttatatttccttcaaaatcttcgtgatacggttttaaagatctatttcctattgaaaaacccggaggattcctatctaaaaaccgaacaaaagctgaagtatcagcaatatagcaatcattataatacatactttcaccaagcattgctgtcgttacaataactttataaatatttttaggatgccattcttcttctagtttcaattcttctcttacaatgtttatattctccacgtaataatcaacaatacgatttagttgctcgacagcacttctttctttatggcttttatttatcttttccgtttccctttgtattatctttattaagaaattataatattccctaatagttagtggttgaccaaaggcttttaattctacaaagaacaaatcattgtcaatagtaaaaactacatcacattcatatgtttcaccattaacaattctctttagtcttttcgcgccaatatctagcttgtttagtttatttaatatgtattcttctaatccagtacccttaaaagaaatatccactttcttcttatttaacagagatatcaatgacattgaaggatctatatgtgatgccacagaaggaataataatcaaactgtcattatgaacgacaaaaggacaatctaacaaatcttttgcatcttgattaaatttgaagttattgatgattttaagagcactggcttgagatactccctttgaaacaaataagtttatccagtaagtttcagttttcataatagtccaattatttaagtttaatggtttaactacttttgactcgaatctttcctttaaataattttcagcctcaatttgaattacaacgtaagctctaatccattctgcgagtgacacacctaaaagccttatatttagatcatgagtgtgtagaaattctcctatcgcaatacaataatatgcttcattctcgcaaagataatgagctggaggtaatttctttgcattttgatcaattttacgttccaattctgttttatcggctaaattaaaatccgtataccatttacttctttgatccttaaatctcacttttgagatttcttgtgcatgtaaaaaatcttcattcttgggctggatgtgaattttcttattatctatatcaaaatctgtaccgataaaacgccatttttgttcaatgttcaaaagagacgaccacaaatcaaatagttcaatatgctctcttgcgactcttatgtgactcatgcgcatagtttcaagttttcctatattaccttttccacctcccatagacttcagtaaactccccgcaaactctgcaatactatcagctatacctaatacacgatttatatctttttgagcaggtaatattttttgtttaccttcatcaaacaatgagatgacgtatggatacacctctttaattctatgtatagaattcccattaatatactcaattagagaacctaacataatctctaaagaaagaataaatgttattacctctctcttctgaggaatttggtctaatttcctggatgatctcaatttataaaaatccttaaaaattgaattaattatattaattttttcttcaaaattatcaattaacttaatatcactcttataaactgctttaatgttagatatgactttttttgatatcttttgtctattattgtagatgttaaaacaaacgcctgagactctaacgatttctaaagtatcttccagagaattgttttgcataaattcgtttaaaaaaggaataaattcctttgaatctttaaacaaagcctcaagttcataatggttccatattttcaagttgttctctccttctatatttttttcaacaaatccactatatatatttctccatttatgtctagctataatcaagacttctatcgcatggggtttgtattgtatatctattacagctttatatttccgttaccaaaacccgcatgcaattggatcttatagacagtcaaatcttctccttggtttataataacccaattaatctcccttataataagcaactttatactttcctgaacttcgcttatgtactttgggtacgaattaatttcttaatgggaactatgaactatccctcattaaatgaaaactccattcctattagtttacttcccaatatttaaatttatacatactcttaaaggaatccgtttgagataaggcaattttctctgcttttctttcatcatatgaggacataccagtaataccaaacacctcaaatattatatccttgtctttattgataacgtatccatccggaataaaatttccataaccttctattggcaaataaggcttataaaatgttagattatcttcacataaccgatcatatatatttttttcatgagaactttcacaatataaacctctaccagatatcggtattaaacagtaattttttagagtcatacatttatgatacttgtcttctttatacacaaaacctgctaccacatattcagggctatgcggttctatttttttcttgtgttcatattcctccttttcaacatagaagcgattagttcgcccaaaagcatcttcacaatacagaatatctttttttgtattatcaaatagagtatcttctccaagcggtattacactatttacatacatgtaaacaaaatagatatctttttttacttttacattccatatgcctacttgtttataaaacatctcgtttaaagtttttctttttctcgataacctaattcgagccgatataccataaacatgtttagctaactcatatttatcattaggaactctatgtttttttcctaacaccatactttcccacgccatcatatttattcttgtggctaagccaaaaatcgttgatacatttttattagatcccgttccttcatgataaatcacattatttctcacattactgtttctttcgttattatcccctagctgagaaagatgtaattctttaattctaacaatatgtaatccctcttcctcatcgtagctccaggccttttcatatgggcttgaacccacaaattgaggatgtcggcaacaatccttggaatgtttaaattgtctggtagaattatataaatacggtgattttgcattggaaactttaagcactatcttatcagaacactcacaccttaattctatttctcccttttcattcctagtttttaagtttagtaacagagattcttttataggtgaataaggtagttttgttatgtttccttttggtttttcaattacaataaatgattttttgaccaatatatcccttcctcctatattaaacagactacaattcaattatagttgaagttaacacaaaaatcgttgaagaatttccaaaaatctcatattttagaattactattaaaaggaggaaaaaagaatcgaaaagacagccagggcaaaggctgcgcataaaaaaaacccggaaatcggaattgtttatttaccgaaatccaggtctgattacgaattgtttattttagttagacgattttaatacaagcttcgccacggcttccacatgagccgtctgcggaaacatatcaacaggctgaatatattcgacgcgatagtccttcgacatcgtctgcaagtctttcgccagtgtggaaggattgcaggatacgtagacgaagcgtttcggttttacttttttgatggtatctaaaaatgttctgtcacagccggttctcggcgggtcgacgatgaccacgtcagggcggaagccttctttcgtccatttcgggagccagtgttcggctgttcctgtgacatatgccgcgtttttgatgccgtgttttttggcgtttttcttcgcatcgtcaattgattctttaatgacgtccatgccgcggatctcttttgcgccgcttgaaacccacatgccgatcgtaccgacgccgcaatacgcgtctacgactttttcttttcctgtcagctgagccgcttgtttcacttcgtcatacagcttgaccgtctgctcagggttgagctggaagaaggcgcgggcgctcagttcaaatgacacgtcaccgagcacttcttgaatggcatggcttccggccagcgcttttgttttgtcaccgaaaatgacggatgtgcgcgcgccgttgacgttttgaataatcgatttcacttccggcagacggttctgaatggctttgacgatctcgtctttattcggcagtgtctctttcgcggtgacaagcacgacctgcacttcgcctgtttcaaaaccgactctcgtcacgatggtgcggacatcgccttttttggtccgttcgttataaacggatacgttgtgtttttccaaaatacggcggacgatacccgttgttttgtttgtcgccggatgctggacaatgcattccttaatcggaacgattttatgggaatccagtccgtataagccggcaatgatgctgccgctttgcgagcgtccgacttggaactggcttttgttccggtaattccaagggttgtccattccgatcgtatctttaattttcatttcttcgacattgaatctcgtatgacgttccagagactgaatgacgatgtcgcgtttttcgcgaagctgctgggtgtatgccagatgctgaagctgacagccgccgcactggtcgtagaccgggcatggcggcgtgacgcggtgttcagacggcttgcggatttttttgacgcgtgcttctgaaaatttcggctgcacatttgtcgcttcggcaacgacttcttcaccgggcagagcgccgggaacgaagacaacttttttcttaaaatagccgacgccctctccgttaatgccgagacgtttgatggtcagcggaaatgtctgtccgattttcaattcggcaggcgcctttttttgatgttgattcacgtttttttctctccgtttctatataaagccttcctcctgggaaaacggctgatttgaaatatcacatcttttcagtataacatgcagccggcggttccttcatgtttttcactggaagtttccaaaaatcctcatcattcaatacttctccacaaatataaggacgcatagcttaaatacggcgcccattcgctgcttacctggagcatcacgtcttttgacggtttatcctcaagggcgaagcggcgtttgacggcgttttgcaggccgatgtccgccaaaggaaacagattcgggcggccgaggccgaacatgaggacgttttggacggtccacgggccgatgcctctgatggcgatcagctttttcataatgtcttcatccgacaaatgggtaagttccgccagattgagcgctccttctgcaatcatccgtgaaatgtcaatcgcatattccgcttttctcatgctgaactggagctcccgcaagtcctgatactcaagcgccgcgatcgttttcggctcgggatagcaccagacgccgtctttttgttcaccgaaggcatggacgaaccgttccgttaaagtaaaagcgaaggacaggttgagctgctggtggatgatgcatttcatgagacagttgtagacgtcatattccaagacgagcggggttcccgcatgctcctcaaaaagcgccgacagatttgtttttgagaaatgatcaagcacaggctgaagcggctgctcccactgaaaaatgtgtttgatccgttcaatcatctcctcgcggtccgtttctccgctgacgagaaagaccgggtctgcggcggtgccttccgcttgaaccgtgatgacggacagtttgccgtcccgtgttctgagcggcactttgattgatcttgcatgaagatcgaccgcattcagcggatcgagcgacagcctttcaaggactttatcaaaatgatacggcggtgtgaccgaaaccgtttccttccacatatgctccacccctttttgtccaagtatatcatgaagcggccgggcggcaattcgtatacttttcttcataacgccgcatgatataatggcaggcggagggttgtttatgatacatataaccgcaatcacaacacataatgagatattagataatatccccctatcacgtacagaacaaccggacatcgcatggtactggattgattttttcggcgctgagatgcatgaaaccgagctgctgcgtgattattttcactttcatccgcttgcgatcgaggattgctttcagcatatgcagcggccgaaaatcgaccattatgacggctaccgtttttatgtgctccacgccttgaacccggacacactggaaatggaagaggtggacatttttcagtccgaccgtttcatcgtcagcttccatttgcacgaatcgcccggcgtctcaaaggtgagagaacggtttttcgcttctccgggattagccaaaaaagggcccgggcacatcacttatatgatgatggatcagcttgtcgatgaatatttccccgtgctgtacaaaattgaagaccggctgaatgaaattgaagacagcagaacacataaatcttacggcactttaatgaatgaagtgtttgaattgcggactgatcttttgaacctgaggcggacgatcattccgatgcgcgatttaatgtaccggattttgagccttgaccatgtaaaagaaagccgtgaaacgaaagcgtatttcagcgatatttatgaccacctgttaaaactggctgagctgatcgagtcaaaccgtgatatgacgtcagatttgcgggacagctacgtgacgctgaattcaaaccggatgaacgccattatgatgacattaaccatcgtctcgaccatttttatcccgctgacgttcatcgcgggggtttacggcatgaatttcgataacatgcctgagcttcactggaaatacgggtattttatcgttttgggcgtcatggccgttcttgtggccgccatgctgttttggttcgcccgtaaaggctggtttaatattttcaagtaagaacggctgccggctgttcttttttttgagaaaacatgatagtctggaaaaaaacgtaaagaggtgtgcgccgttaccatcctttctcacaaaatcatttcttctgtcctcctggctttcagtgtcatgtccattgccccgctgtataacggccgtacggtgtctgattacatctttgagttactcggcttttcctcttggccggaagatggagcccatatctccgtcattcccggggttgtgctttactttgcggcgttaatctggtgtgccgccgcgttcaggcggacgcttcccgcggcggggctgtttctgatctttctcagtatgggggccgcttccggtatcagtcctgccaccgaatatgccgttttttccttaaaacagttcgcgcccgaaaaagaggctgtcgaatatgtgaagcaccgcagcgaatgcagtcatctggttgagcgaaaaagagcgggcatgagctgcacactttatatcaatcattacggaaaaggggaacaaaccatttctgtcaccccggatttatcagaaaacataaaggacgtcacattcaaatcaaaaacattcactgtaaaaccccgttcaaaaacaatcatcaaaacccgatttaccggattttataaggggaaagccgcctcagactccggatggtcttcagaacctgaactgaaagtggcaatcctgtacacagcagattaaccattttgcatgtataatggtggaaaacttttcattggagggactgtgaaatgaagatcgccatcgtcggactcggcaatatgggccgccccatcgccgaaaatatcatgaaagccggatacagtctgactgtatataaccggacgaaagaaaaagcggctgacctgctggataaaggggcagaatatgccgaaacgccccgacaggcagctgaacatgcggacatcgtgctgtccatgctgtcagacgatgacgccgtaacagacgtgactttcggagcttgcggcattattgccgggttatctgaaaacggcattcatatttcaatgagcacgatcagtacggcgctgtcagaacagctttccgccgcacattcgggcagagggcagtcctttattgccgctcccgtcctcggccgccccgatgccgccgagaaggccgagcttcgcatcatcacagccggaccggcggaagcgaagaaaaaggccgaaccgctgcttaacatcctgagtcagcaagtatttgacactggtgaagaaacaaaaacggccaatgccgcgaaaatcagcgtcaatttcttgctcgtgtccatgcttgaggcgttatctgaatcgttcttaatgatggagaagtacgggttagaacaaaaacaatttttagaaatcgccggcgcgctctttggctctcccgtctatcaaaattacggcacgatcatggctgaggagaaatttcagccggccggtttcaaaatgtctttagggctgaaggataccaacctggcgctcgccgccgcagaacaggtttccgcaaaactccctcttgccgaactggccaagagccattttgaaagcgggatcgcacaaggcttcggggatctggattgggccgctttgattaaatgcctgaaataacaaaacacctctccattaccaggagaggtgttttctacaggcgcggcagcttcatttctttctcaaacatcaggtcatcaatgcttttaaacgtgtagccttcttttttcaaatcggtaatggcatcgtccagagcttctgaattgtcctttgaaacggtgtgaagaaggtagatcgcgccgggatgcgcctgctttatcatgtgatcataggcgtattgtttccctttttgctcgttaaccttccagtcgacaaatgcgacggaccagaaaacggtttggtagccgaggcgcttcgtttctttgaggacatattcgctgaatacgccgcgcggcggacggagatataggttgtcccgcttcccggtaatgttgtacacggcttccgtgacggaatcgagttcgtcttgaatctgatcgcccgtttttgtcgtcagatcaggatgatgaaaagaatgattgccgatgatatggccttcctttgacatccgtttaatcaaatcaggctgctctttcacaaaatgacccgtgacaaaaaaagtgcccgtgacgtgatgtttttttaacacatcaagcactttcggggtgtacccattttcatatccgttatcaaatgttaaatagatggtcttttctttcgtattgcccaaataaaaggcatcatattttttgaccagattgtccagctgtctgccggcatccggcggctgatgattgacgctgcgtttaaagccccagtttatccgttcattcggcacggcttctgcgctgttgatgcctcccgcaagtaaaacggccatgcagcaaattgaacaaaaccatttcatgaccagcactccttctgcatttttccttattttgcagtaggccctgcccttttatacagccgcattatggaaaaagaaaaaccccggcatccgccggggtttattcccaatcctttttaaagcgttcgtattttgcttccagatcatcaagcatgccgatgagccggtctatatcttcaacgtccgttgattcagggtctaatgaatcaatgacattcataaacatatcgagtctgttcttcaggtaatcgagctgctgatctttgctgtttactgcattccccatacttccactccattcattttttataatggtagcgtattttttgccgtttttcaatggttccgctacttgcgatcttggcagatcaggtctaaaattaacagttggcagacgttagtatgccccatttataaaggagttagatagtcatgacacaaaacacaacactgcgtccgatcacaccggagtacgatccttgggaagcgtacatggatgtcgaccagtatggagatatgaaactgacgaacgttgaattcacaacgacgactttgtgcaatatgagatgcgagcactgcgccgtcgggtacacgctccagccgaaagacccgaatgcgctgccgatcgaccttttattaaagcggcttgatgaaattcctctgttacgctctatcagcattacgggcggcgaaccgatgctttcgctgaaatcggtaaaggaatacgtcgtcccgcttttgaaatatgcccatgaacgcggcgtccgtacacagatcaattcaaacctgacgcttgatatcgggcgctacgaacggattattccttatttggacgtccttcacatttctcacaactggggaacggtcgaggactttgccgacatcggatttgcgatgatggagaagaaaccgacatttgaacagcgggcgcgctattttgacaaaatgattgaaaacagccgcacgctggtcgaagcaggcgtaatggtttcagcggaaacgatgctgaacaaacggacgctgccgcatattgaacatattcaccggcagattacggaagaaatgaaatgccagcggcacgaagtccatccgatgtatccgagtgatttcgccagcgcgcttgaatcactcagcctgaaggacatgagacaggccattcatcatctgctcgacattcgcgatgaagagacatggatgctgttcggtacgctcccgttttacgcatgcagccctgatgaagaagatcagaagctcctccgccgcctgcgggaagcgaaaaacgttacggtgcgaaacgaccctgacggccgctcccgcctgaatgtcaacatttttgacggaaatatcattgtcacggatttcggcgatacaccgccgctcggcaatattaaaacagacagccttcccgaagcatatgacaagtggagacagacgaagctgagcaaagagctgaactgccgctgcacaaacgtccggtgcctcggcccgaacgtccttgtcaaaaacagttattatcaggacacagatttttcattacgaaaagccagaggttaacaaaagatggaaacgacaattacggacattttgaaaagcaaagtggttgagatcatcatcgttgctctcgtgctttacgccggtgtttttctgatcaaccgctttgtccaggtgttatttaaacgcacggatttcttggaggaacggaaagggaaaacgattgaaagcctcgtccgatccatcacccagtatacggcgacgatcggttttatcttttacgtcatttctttattcgttcatgatttcggccgaattttagccggggcgggtgttgccggtatcgtcatcggttttggcgcccagtcgttaatcaaggacatattggccggtgtctttttaatatacgaacgccagcttcataaaggtgattacgtgacgattaacaatctgttcaacggcacagtcgaagaaatcggactccgttccctccagatccgtgagtggaccggcaagctgcttaccatatctaacggtgaggtcagacagcttcaaaactataacattgattttatgcggattaccgagtccgtcgtgatcagttacaaggaagatcccgagcgggtatatgccgtcttagaaaaagcctgcgatatgctcaatgatgagcttcgcgattcactgaagcgggatgaatttctcaatgcgacggagccgtttcaagtgcatggaattatgagtttgaacaaattaaccagaggcattgaatttacagtgaaaggcatggttcaagacacagaatacttctcggcgagccttgcggtgagacgcgttcttgcccgggagctgtacaacaacaatgtgcaattgctcgaggaaatgtatcacacacaaaaaagctgattcccgaaccggaaccagctttttttatttatctcggctgcgctgtcatttgaaaaccgaatgtgacgtgatcctgcaccggaatccaagccccgattccttgcgaagtcacatttttgacgacaagtttccgcttgctgcctttcagcaccaaatacacttcaccgtatgttacttttcctttttcattaacggccggagcgtaggcgtgcaggtagccgagccgctgcggagaaattttgtaggtttgatcgcgttttgtgcctgcgccgataaccgtttcaaacgcgagcggcagttttgttttcttcatcgctttttgcatcatcatgctttttacgtcttctgcgttcggcaccttcgctgtgagcccgcctttgattttgtattgctgttcttgggcgtatgagataaccgcggtttgctgtccgccccggttatccgctctgtttgtgttgatttttttatattcccagttggcgaccgtttcgttcgattgatagccgagcgcccatttcccgagaaatattgtcgcccggtatccgatggcaagcggtgaaccggaaaccgaggattcattcagcatctttatcagatgcggattttcgatgttgatctcggatgtatctaacaattcctttgccagtttgctcggctgaagcatcggctggtcctgtgaagcattcggatacgtattttcctttgaaatgcttacgacagagttgggaaccttaaacggtttttttgcagcggcagacggcgttgcgaaaaaactaaaggataacagcagaatcagtgtggcatgaaacagctttctcatcatatcactctttctatagcattttcctttagtcttttcctccgcaatcgttgttatccgcattttttacaggttaaagcaggaaaaaaccgatcgccataatgacataagcggcaaggagcgtagccccttcaaaccagttcgaatcaccgtcatttgaaatcatcgtcatcaaaaggacggatgagatcatcgcgacaagctcgggcaatgtgaatacaagcggcatattgaccggaaaaaagatggaacagatcacaagaaccggagccacaaacatggcgatctgcaaagtcgagcctaccgcgatttcaacggcgacatccatcttgtctttgtacgccataataatcgccgacgcatgctctgcggcatttccgacgattgcgacgataatcactccgataaacagctcgctccagccaaactgttcagccaccgcatgaaacgtatggacaaggttttcagatatgtaggcgacgataatggttgaaataaataagacggctgtcgctcttttccccgaccactcaggctgctcctcttcttcctttgcctccggctgattcggctgataaacaccgcggtgggtgacgagcttgaaataaagagctgccacgtacaaaaggatcatgatgatgctgatgccgacactcaaatcaagcttgtttttttcccccatatccatggaaaacacttcgggaatgacaaaagcaacgataatggcaaaaatcagcaagccggaattatgccgtgcatcatgaatattgaattcctgccgcttgtatttcaaaccgccgataaaaaacgacagtcccgcgacgagcagaagattgccgagcaccgaaccggtcagtgaagcaagcacgatgcccgtcagcccttcttttagggcgaaaagcgatataatcagctctaccgcattgccgaacgtggcattcagcagaccgccgatccgcggtcccgcgataatggcaagagattcagtcgctctccccatataacttgcaagcgcaataatcgtcaagcaataaataataaacaaaaccgctgacggccagtgcatcaggccgccgatgactgaaagcggcactcccgccgcagctgtaaagaaaaaaatccgattcatatctgcctggctccttttttcgaatgagtctttttatatccttctcaaaaactccctcaattacacttccgcggcagcccgaattggcattttcaggttgccggacgcgacaaatccgtgtacgatcaagaaagatactgaagaaggagaaatacgcgatgtcacgactgtacttctttattttggttctgcttgtttccatctccggattttcccaaggcatgcttctgccggtgatctccgtcatttttgaaacgaacggggaatcagccgctataaacggacttcacgcaaccggcctttatatcggcgtgcttctggcgtcgccgtttatggaggccccgctgcgcaagctcggattcaaacctctgatggtcatgggcggatttcttgttatcatcagcttattcagttttatttggcttcaatccatatggttatggttttttcttcggctgcttatcggaatcggggatcatatgctgcatttttcaacccaaacgtgggtgacgtcaaagtcaacgccccgaaacagaggaagaaacatttcgctgtacgggctgtccttcgggcttggattcgctgtcggcccgttcatggtccctcttgtgaaaacaagtccgtcccttccgtttatcgtatccggctgtatcagtcttgccgcctggctgtttgtatttgtcttacgtaacgagtacccggcgcaaggtccggatgaaacatccggggataacagcgcaaaacggttttatcgcgcccttcttttcggctgggtcgcttttctcccggctttcgggtacggttttttagaaacggcgctgaacggaagctttcccgtgtacgccctgcgcttaggcatatccgtcgatgccgtcgcgctgatattgcccgcttttgccatcggaagtattgtattccagttccctctcggtttattaagcgatcgattcgggagaaaacgtgtcctgctcgtcatcttattaacgggtgccctttgctttttgacggccggactgtttccgtcgccttctgtcatcggctgctgctttttcacggcgggaatggcggtcggcagtatgttttccctcggcatcagctatatgagcgacctgctgccgtcccatctgctgccggcgggcaatctgctctgcggcatttccttcagcctcggcagcatgatcggcccggtggcgggcggctggtatatgcagcggtttgaaagcgccaatttgttttactttattacggtgattctggtctgtatttggcttgcgctcgtcttcgggaaaacaaagcacagtcccgcatccgaatcccattcttttccgtcctcataaaaaaagccgcctgatctaagtcaggcggcttctttctagtggtatccgttctgcccgttagcgcttccgcttgttttattcttcgggccgttttttgagttttgtttattatggcttccgccttttttcgtatgcttggtcatagccgattccctccgtttttcagcttgaacgtcatccgttcctctatagcttgctcccgcggtacggattttcatcaggaagctttttacgtttatgtaaaagcgcgttgatttcgcctcctaaaatcagcagtgttcccgtaaggtaaaaccagatcataaggacgataattcccccgatgctcccgtatgtggcgctgtagttggcaaaggtgccgacgtaaaatgagaacagcatactgacgataatccagccggctgccgcaaatacggctcccggcagcacaaaacggagggaaagccttttattcggcgcgaaaatgtaaagcgcggtaaacacgattaaaaggataagcggactgataccccagcggacaaccgaccacacctgcaaaaacaggccggaggcgccgatgaaatctgcggccagcattccgatttctctgccgaacaccggcagaagcaatgcgattaaaatcgtaaccaccatcgcgatggttaaaaaaattgaggtcaggcgaatgatgataaatgagcggttttcctcgacttcgtaggcatggttaaatgctctgacaatcgcgttcataccattcgaagccgaccagatgacggcgataatcccgaatgacaaaagcccgccgctgcgcttgttcagcgtttgctctgttatggatttcaccatagacatggcgctgtcgggcgcgtattgatcgaccgccccgagcacgtcttctgccgatatgggaagataggcggtgagcgtcagcatgaaaatcattaacggaaacaatgacagcaggaaaaaatacgccagctccgccgatttactttgtccttcatggagagaaaaccttgcaaacagctcctttataaaactcatgacatcccacctcaatgatcgtttttcgaaaaatgctccttcgtttcttttaacaggtcaatgacctgcggtgtcgtctgcttcagcttagtgatctggccgtttaaaaaactcagatcatccgatacggtattggcgatggtcttcacttgatcaagttttgcagatgcctgctgtttcagcacttcaggatgttttcggtagaatgccgcacgctgcctgcacgcgtccatgttccggaaacatgcctctcttgtcggcttatgtaataaggacagtgctcccccggcggcagcgccgatcagaatcgcttttgccatgatgcgtgtctgcttcatcggtcaatcccccttataaatgatggtctttctttattgtctccagcaaatgacggcacccggactcgaccaaagcgtacacctcgctgaaattcccggtataatacggatcgggcacgtccgcaaggtccgactccggtacataatcaagcagccttgcaatacgcggcgccgcttttttataaccggccatgctgcgcagatgtccgatattttctgcatccatcgcaatgacgtaatcaaaatcggtcagatcagactcacgcacctgcctcgccgtgatgccgcttacgctgatccctttctcctttaggatctcctttgtcccttcatgcggcggatttcccgcatgccaggcgccgattcccgctgaatcaatgttaatctgcccgttcagcccgtttttcttcaccatatcagaaaataccgcctctgccataggcgaccggcaaatatttcccagacagacaaacaacacatgtatcatatcgataacctccctagtctttccccgcattttgaggatcaaaaaccttatcatcatcttagcaacttttctgctgctgtggaaataagcttttattctaaatgaattctgttagaataaagggtacgaaaacggtcatgaaaggatgcatgaatttgccgagccaaaaaacagaaacgttaaacaaaatgattgaagacatttcgcaaaagctcaacatgctcaatgtcggcgtcatcagagcggaagatttcagtgatgaaaaaatagaagatcttacataccttcatcaaatggtcatgaaaaaagcatcattcagcccgagtgaaatgcaggccattgccgaggagctcgcctctctcagaaaataaacccatgtcagacctgccgaaaaacggcgggtctttttttgatttaaaaaagtgaaaaataaaagttcatcggtttgacacatataaaaagaaggagtatagtaactgtgaacttggtagaacgatatactaaatgagcgggccgcttatctttttcctatttagtagaacgatatactcgttgtgatatcagcgttattcaagtttgtctctgcaaccgttttatcaaaccagttttcaaagaaaggcagtggttcaataaaggggaatggttctgtgcttttgttaatttaaaaattaatttaattctttattaaccgcattaggggatgtcatcatgaaaaacatatacaccaaaatggcagcgggtctttatgttaattatttcctgctgggcatgatcaatattattatcgcatccaatatggaggcattatcaaaacagcttcatacatccgcagccggggtcagctatttggtctccgccatcgggatcgggaagctgatttcgcttctgtttgccgggaagctttcggatacattcgggagacggccgtttatcgtgtcgggcgcctttctgtatctgattttcctaatcggaattccgctttcgacaaactatacggccgcgtttatcttcgccattttcgccgggatcgccaattccttcttggattccgggacatatccggcgcttattgaaggatttccgaaaaacgcaagctctgcaaccgtgttaatcaaagcgtttgtatccatcggcgcgacggtgcttccgttttttatcgcgtttattgcggacaggcatttgttttacggctggacgtttttcgtaccgggcattattttcttcctgaacggctttttcctgttaaaagttccgtttccgaatcataagcaaaaagaagacggcggccggacggaagcctctccgtctgatgacgcgttcacatcacagccgtcgatatggcgtgaaggccttgcgatcattctgttaggcttttcatctacggcgctgtttatgctcgttcaagtatggcttcctaagttcgggcaaaccgttttgggcatgcctgaggtgcaggctgtcaaattgctgagctattacagcatcggtgcgcttgtgtccgtattattgctggccgtgctgttaaacagagtgattcagccgattacggtaatggtgctgtaccctgtgatcgcggcaatcgcgctgcttgctctgattttcattcatcagccggccgtatcagtcatcagctcctttgtcatcggactttcaactgcgggcattctgcaattggcgatgacggttatggctgttttattccctaaaaataaaggtacgatcacatcttttgttaatatagcatcaagcttatcttttattgtcattccgcttgtaacgggagcgatatccaaagcggccggcctgacgcctgtttttctgcttgatatcggaattgcggttgtcagcgcccttctcgcattgtttatcggaatccgctttaagcaagtgatgaaagcctgactattttttaagggagaggatttatcatgcaatctatcacgatcagaaacacggtcatcggcgaagggcttccgaagatcattgtgccgctgatggcgcccggagagaaagaactgctcgaagaaattgaagccgtcaacaggcttcgcccggatatcattgagtggcgggcggatgtgtacgagcacgttgacagcctggacgccgtaaaaggcatgcttgaaaagctgcggaaagccgcaggcgcaacaccgctgcttttcacattcagaactcataaagaaggcggaaataaagttattgatgatcgcttctacattgaattgcttaaaaccgccatcgaaacaaaacacattgaccttgcagacgttgagttgtttacgggagaagcggaagtcaaatcaattgtgaaaaccgctgaagacaacggcgtatatgtcgtcatgtccaatcatgattttcatcagacaccgaaaaaagaagaaatcatttcccggctgcggaacatgcaggcgtacggcgcgcacattccgaaaatcgcggtgatgccgcaaagcactgaagatgttttcgtcttattggatgccactcacacgatgaaaacacaatacgcagaccggccgatcatcacgatgtcaatggcgggaacaggtctgatcagccgcctggccggcgaagtcttcggctcagcgtgcacgttcggagcgggcaaagaagcatcagcgcccggacagattcccgttgaagaattgcgcagcgtactcagcattttaaataaacatatgtaatcagcgttttttgccctcaaagcgggttgaaaaacaaatgaatggactaacggaggaatacatcatgaagaaagatttaggacggattaacggaaaaactcagcttatcggattattcgcgacaccgatcggacactctttatctccggcgatgcacaacctggcgtttaaaaaattaggattgaactacgcttacctcgcgtttgaagtcggcaatgaacagctggaagatgtggtaacgggaatgcgcgccttaaacgtcagaggcttcaatgtctcgatgccgaacaagatgaacattctcccttacctcgatgaactcgcggattcagcgaaattcaccggcgcggtaaatacagtcgttaatgaaaacggcagactgatcggacactccactgacggtatgggatacgtccgcaacttaaaagaacacggcatcgatatcacgggcaaaaaaatgacgctggtcggttccggcggggccgccactccgatagcgattcaatccgcattggaaggcctcggagaaatctctattttcgcccgcaatgacgcatttttcgaaaaagcggaagaaaacgtccgcatcatcaatgaagaaatgaagggatcttcttgcaaagcgaaagtcttcccgctcgaagatcaagatgcgctgcgtgctgaaatcgcttcaagcgatattttcacaaacggaacgggtgtcggcatgaaaccgcttgaaggcttgagcgtcattgaagatacatccatgctccgtccggatttgattgtgacagacgtcgtttacaaccccgttacgtcgaaattgcttgaacaagctcaagcggccggctgcaaaaccattaacggcctcggcatgatgctttggcagggcgccatggcgtttgaatattggacaggccgtgaaatgccggttcagtatattaaagagcaaatgtttgaataacctattgtgacagaagcgccgaaggacaatccgtcttccggcgctttgtcattttctcccctctctctttcttctcagccgtcaaaacgcttataatggatgtaacgaataaaaaaccaagtgaggaatgcgacgtatgagacagcaaaaaaaacgccgggtgacattgcagcaggtcgctgaacatgccggtgtctcaacatccaccgcttcattaatcgtccgcaataatccgcgaatttccgaagcgacccgtgagaaagtgctgcaatccatgcgggagctggggtacgtatatgatcgggtcgccgcgaatttacgatcacagacgtccacaacggtaggattgattattactgacatttccaatacgtttttctcagagtttctgatcggcgttcagaatacgcttgaggaagtcggattaacagtgctgttaggcacgacatttgattccgtcgccaagcaggagcagctgatctcgaccatgctggagcacagggtcggcggattgattttgtgtccggtttcaggtacggctgaggaaaccctttcccgccttgagcagcttgacattccggtcgtgctcgccgtcagggagattgccgatgccgactgtgattttgtcggagccgattatgaggaaggcacctataaggcagtgcgtcatttcattgagaaaggccatcaggagattgcgtttctgggcggcgtgaagcactcatcaacatggacgaagcgcatgaaagggtttaaaaaagcgctccgtgaagcggatctggaagtgaaaaatgaatatgtcattgacagcgcgccgacccgcgaagcaggctgtgaagccgtgacggagctcctccgccggtctgagcgcccgaccgcgattttctgcttcagtgatttggtcgcgttcggcgtcatgcaagggatcagaaaagccgggctcattccgggcgaagatattgacattgtcggctttgataacgtgccggaagctgaaatttcttatcccccgcttacaaccgtttcttcctttccgcggcagtcgggaaaagaagcggctcaattgctgcatcataaaatcaccagttcccagcacaaaaaacaacgcattattctggcgcctgagctggtcatccgggaatcttcacaaaaaaagcggaacgcctgatacggcgctccgcttttatattacgcaagcagttttaatgattcgcggttgaatgccggtatgtcatccggtgtgcggcttgtgaccagctggttctggcagacgacgacttcttcatccaccacatttgcgcccgcgttttccatgtcgattcggattgatgtaaaccctgtcgctttgcgcccgtccaatgctttcgcgttgatgagaagctgaggtccgtggcagatggcgaacaccggttttttatcatccataaacgctttggcaaattggacgaaacggtcatccgcacgcagcatgtcaggagagaatccgcccgggatcagcaatgcgtcaaagtctttcggatttacattatcgatggacgcgtccactttcacttcggcttccccttgtttgcctttgactgtttttcctttttcctgttcaattacggttaattcatgacccgcatctttaaaagctttcgcaggttcagtatactcgacatcctcaaaataatcggttaatacaactgcaatttttttacccatagttactacctcctgcttgatgaagtctacataaatccatgtaccccagccacactaacatcaaacataggtaacgcgtttgccgctcatccgttttacataggtcattatcctcatttttcatctttttacaagaatcatcatgaaatctatataaactttcacaaaatattcttacaatggtactgcatgacaaaatttgttgaaaggtggagaacaggtgagaatacagaaaagacgatgcagcgtcaatatgacactccgtattctgctgcccctagttatgatacttagtctaatcctcccaacatcacccattaaagcagaagaaaacaaatcctccagtgtgaatctcagcattttagccacaactgacgttcacgctaacatgatggactacgattactacagcgacaaaccgacaacggaattcgggctggcacgaacggctcagcttattgagaagcacaggcgcgaaaacccgaatacgctgcttgtcgataacggagacctgattcaggggaatcccctcggagaatacgccgtaaaatatgagaaaaatgatattatttcaggcgcaaagacccatccgatcattgaagtgatgaacagtctgcattatgacgcaggaacactcggcaatcatgaatttaattacgggcttgaatttctggacgggacaatcaaaggcgctgattatccgatcgttaacgccaatgtgaaaacattaagcggcgaaaaccgttatacgccttatgtcataaaagacaaaaccgtcacggatgaaaacggcggcaagcatcagataaaagtcggctacatcggctttgttcctccccaaatcatgacgtgggataagaaaaatctcgaaggccgcgttcaggtcgaagacattgtggaatccgcaaagaaaaccgttccgaaaatgaaagctgaaggagccgatatcgtcatcgccctcgcccacagcggcatcgaaaaaaaagcgcagtcttccggagcggaaaacgccgtttttgacctggcaacgaaagtcagcggaattgacgcgatcgtatccggccatcagcacgggcttttccctgatgccgaatataaaggcgctgatcaatttgacgtcgatcaaggcacgattaacggcatccccgttgtcatgtcaagcagctggggcaaatatgcgggcgtcatcgacctccggcttgaaaagacagacagcgcgtggcatgtggaagatgcaaaaggcagcatcgagccgattgccggcaatgtgacgtcggaaaacgaaaccgtcgtcaataccgttaaaaaagcgcacgaaggcacattgaaatacatcagagaacccgtcggccagacaaaagccgatatcaacagtttcttcgcccaagtcaaagatgatccgtccattcaaatcgtaacggatgcacaaaaatggtacgccgaaaataagatgaaggatacggaatacaaagatctgcctatcctctcggcgggcgccccgtttaaagccggcgggcggaacggctcaaattactatacaaacatttccgctggcgacctcgccatcaaaaacatcggcgatttgtacctgtatgacaacacggttcagatcgtcaagctgaacggaagcgaagtgaaagactggctcgaaatgtccgcggggcaatttaatcagatcgatcaggcaaaaggcggcagccaagcgcttttaaatgacgcctaccgctcatacaattttgatgtcattgacggtgtcacctatcaggtcgatgtcacaaaaccggcgaaatacaacgaaaacggaacagtcattcatcccgatgcaagccggatcgtcaacctttcttatcaaggaaagcccgtcagcgccaagcaggaatttctgatcgtcacaaataattaccgcgcttcaggcggcggaggattccctcacttaagcaatgataaaatcgtatactcttctgccgatgagaacaggcaggtcttaatggattacatcatccagcagaaaacgattaatccgcaggctgatcataactggtccatccttccggtcaaagggacaaacctgacatttgaatcttccttggccgcaaagccgtttgctgaccgcgcagatgacgtcgcctatatcggtgaatcacaaaacgcgggctacggacagtacaagctccaattcaaagatgatgaaccgggcacagatccgccgaaagatgacgcatggaaactcaccgttatgcatacaaacgacacgcacgcccaccttgataacgcggcgaggcggatgacgaaaatcaaagaaatcagaagcgaaaccgaccgcagcattttgctggatgcgggagacgttttctcaggcgatctctatttcacaaagtggcaggggctggctgatttaaagttgatgaacagcatgggctacgacgcaatgaccttcggaaaccatgagtttgataaaggcccgggtgctctcgccagcttcctgagcggtaacgggagcgcggctgacccgtccggaaaatacaattttcaagcgcctgactttccgctcgtcagctcaaatgtcgatgtgtccaaagagtcaaaactcagaccattcatgaaaaaagcagacacatttacggcagggaaaaagaaaaaagcaggcatctatccatacattctgcttgatgtaaacggagaaaaagtcgccgtattcggcttaacgacagaagatacgtccgtcacatcaagcccgggaaaaagcattgtctttcatgatgccttccaatccgcacaagatacggtaaaagaaatacagaacaaggaacatgtcaataaaattattgccctgacccatatcgggcatcagcgtgatctcgatcttgccaaaaaggtaaaaggcatcgacttgatcgtcggcggacatacgcatacgcttgtagataaaatggaagttgtcaaaaacgaagagccgaccatcgtcgcccaggcaaaagaatacggcgaatatttaggccgtgtcgatgtcgcatttgacaaaaacggcatcgtcctgccggaacaatcctctcttcaggcgattccggtgaacgagcagacgaaagaagacccggatctgaaaaaagagcttgatccgtttaaaaaagagctcgtctcagtcaaaaatgaaaaagtcggctcaacgaaggtcgcacttgacggccagcgcgagcatgtccgctccaaagaaaccaatctcggaaacttcatcgcggacggcatgctgcaaaaagcgaaggaagcggccggcgcccaaatcgcgatcacaaacgggggcggcatccgcgcgggcattgataaaggagacatcacactcggcgatgtgctgaatgtgatgccgttcggcaacacgctttacgtcgcggatttaaccggaaaacagatcaaacaagccctggaacaagggttaagcggaattgaggctcaaggcggcgccttccctcaagttgccggtttaacatacacgtttacactgaataaaaagccgggacaccgcgttcttcaagctgcggccgtacaggatgacggcagcgtaaagccgatttctgataagaagacatacagagtcgccaccagtaactttgtcggtgaaggcggagacggatattccgtctttaacgaagcgtcccataaagaagacctcggctttgtcgactatgaggtcttcaccgagcagcttgaaaaagcgggaaaagcggtggaaccgaaagttgacggccgcgcgcaggaagtgtatctgccgacgaaacaaaaaaacggttcgtggacgcttgaagatgacagcgcatttgccgcctatgccaaaaacgccaacacgccgatcgtgtattacgataagaatgacggcgccaaaaagccgattgatctcagcgtgaccaaaaaacaaatcggcctgttaaaggacagaacatcggattcttcccttacgatcctgcatgacaagttcagcatgaaaatgccgatggcaaatgctgcttcagctgatacacaattcggcgtgacgccgaaaggaaaagtaagcggggcgctttcaaatgtatacgactttacaatgaagcagaaaaacaaagacatcaaaacattcaaagcgccggtaaagctcaccctgcgcattgagaatacgaaaaaggcgaaacagccgggcatttaccatgtagaccggaaaaagaacgtctatacaaaaacagacaacggttcggtttcacacgatctcgtcacgggctatacaaatcatttcagtgaatacaccgtattaaacgcaaacacgaagagcgcgccgccgacaagcggagatcacggctccggaaagcagccaagcggacaaaaaccgtcacccggccctgcgcaggacggagtatcgccgggcggcctgcttcctgatacggccacaacgatgtattccatccttcttgccgggttactcatcagcgcgctcggaacggcactgtatctgcatcaaagaagaaaagcaaaaaaagtgaacgacgcataaaaagaccgcttttatcgggcggttcatccaaaagctctcctgatctgatatcaggggagctttttctctcggtccccctctgagtcgacagccgtacggccgagtgataaaatatgaacgttattcgcgaaagactgcatccgcatcgtttaacacttcacggcagggcctctctttcccacggcgccgcctgtttggaggactttttttgaagataacaggacacaaacgaaaccgcatgtcttacaagaaaaagctgttttacgtgataacagcgctctgttttatcagctcgttcattttcgtcactcacaacgcttctttttatgagcggccgattgccaaagtgacgaaaacaacattggaacatcagtctgacgtacaggacatgcataaaaacaaagataagattttcaatcagacgatcacagccagacttgaaaacggcagtcagaaaggacagctcattcatttgtccaatcagtattcatcatccggagcgaacgatcagaaatattcgattggagatgaagtattcgtttctattgataaagggaaaccatcaaacaaggatatatcgggaagcattatagataaaaaacgggataaacagcttttgctgatcgcttgggttttcatcttcaccttgcttatcgtcggcaaaaaacaaggcttcttttcgatcgtcagcctgatgtttaacgccgttttactgtcgtttgcattagatttgtacaggaagcatcctaatatagggttaattttcatctgcggtatctgtattctcatctttactgtcatctcattgctgcttgtcagcggttttcacgcgaaaacatacgctgccattgccgcgacgctcgcaggcactttcgtttccctgctgattacgtatttggtgatgctggcaaccggtgagaaaggtctcagatatgaggaaatgcagtatttaacccgcccttatcacacggtgttcatggccggggtatttatcggatcactgggagcggtcatggatgtggccattaccatgacgtcatctgtcttcggattatatgaagaaaacaagggtatctcattacaagctctcagacgttccgggatggagatcggaaaagacatcatgggggcgatgaccaacattctgttttttgcttatataagcggctctattccgatgatgcttttgtatttgaaaaatgattccccgataggattcactctttctatgaacatttccttggaaatagccagagcattggccggagggatcggaatcgtattagccatacccgccagtctgtatgcttctatcttttttattaaacgaaagaaggcaagctcatgaatgtcatcgtaattctcgcggcgattttatttctattgatggtcatcatcggcggaaaaaaaggagcgaggtcttttattgcgttattcttaaatttcggtgttctctttctcaccatcattttcatgacagacccgcatatcaatccgattgttttaacattgctctcttccgccgtgatttgcagcattactcttttttatattaatggaggaaacgtcaaaaccgtaaccgcctttatttccgcaatgctgacgattgtactgctgctgttttttattatgtctgtaacaaaacatacttcgattcagggattcggtgaagaagaattgggtgatatcggcatattcacactgtttgtcggggtggattttgtgaaggttaccgcagccatgatcatcatgggcacgataggggcgattaccgatgtcgcgatttccattacttcacccatgcgggaaatttacagtcataatccgtccatgagcagaaaagatctgtacacattcggattaagcatcgggagagatattttaggaacaaatacgaatacgttattctttgcttttttcggtagctatttggctttaattatctggtttaaagacttatcatactcagctgaaaaaatagtgaactcaaaagtattcagtgcggaagccgtcaccattctttgtgccggaatcgggatcggcatcatcattcccgttacatcctggattaccgcctgttttttagcaaaaccgaataaacgttaaaagctgccgagacatgcccggcagccttttttatcttatacccactttacaacgtcttttgaggcagatcttgttttcgggcgcggttctctgacacggtagccgaatgcggccataacagagatgtcgaaacttccgttttccagaagcccttcttcttcaagaatccggtgaatttctttgtagttgaagccttctacagggcaggagtcgattccgatctgcgcagcggctgtcatcatattgccgagagcgatgtatgtctgtttggatgcccagtcaaacagcgcgcgatctgattcaagcagattgaaatcatttttctgaaagtcttccgttttgctgatatagccttcatacatatcttccggcatttttttgacttcccgcaagtggtttttgacatagtcggcgtcaaaacggatatcctttgccgtccgggcaagcagaagtacgaaatggcttgcggtcggcagctgcttttgcgcgccccatgtgaactcgcggagtttttcacgaagctccggattttgaacgacgacaaatttccaaggctccaaaccgagtgagcttggggataatcttcccgtttctaaaatgaattcaaaatcgctttctgaaatttttttctcaggatcaaattcctttgtggcgtgtctgaattgatacgcttcgatgatctgctgttttttatctgacattcatgatctctccttttcaatcgttatgtactattgtagccattatttttgaaagtaccagtacgcacatttttgtgggatagtattcattttgatactgacaaaaaaacgggctgccgcggcagtccgtttttatttttctcttctcgcaaagtcgacgaaacggaatttatcgagcctgtgccggctttccgtgtactgaaagaggctggtatcgtccaaaaagacgcggtttttcacgaccgccatatggctgaatccgccgagatccaaatacttccggtcctcttcccccgccggctccacgacaatttccttttgcgcgtagctgatggacaggccgagctctccttcgagatactcatagatcgaatcttcacaaatcgccttcgtcagtagaggcacatgtttttttacaaagtaatccttgtccaaaataatttgttctccgtcaatccgtcttgatctgacgacttcccacaccttttcatccgcttctgtaccaagctcttttgcggcttctgagggaggcaggatcagcccgagacggtgaaccgtcgttctcgtctcttttccgagcgtttccgaaagctccttgaagctgatcaggcctgagacgggaaaacgcattttttctctgtctaatatgacggagcctttgcctttgattttctggatgtagccgttttgcgccagcatattgagcgctttgcggacggtttctcgtgatgtgccgtattgatcgcacaaatcattttcagacggaagaacgtcttcagccttccgctggccgctttcgatctgccgcaccatatctttatagattgtgatgtatttattcactttcatttgaccacccagattagtgtatcacgcttttgtcagatgataaacgatcgattcatacggacggagcgtcaatcgttccggccgcccttccctcggttcatcattcgtcagcagcaccgtaaaccgccagccgtccgtgtcttttagcggaaccgtaaagtccgcttctttcccgtagaagttgttgatgcacagcagtttttcatccttgccgtgtctgacgtacgccagaaccgccggatcgtcttcagcaagcagctcaaacgttccttcagtcacgatgtcatattcttttctgagcttgatgagcttctgataatgatagaaaattgaatccgggtcccgcaaagccgcttccgcgttaacgtcccgataatcatccgccgccggaatccaaggcgtgcctgtcgtgaaaccgccgtgcggcccgctgttccactgaatgggggttcttgcattgtctcttgatttctcttttaaaatggcgataatgtctttttcgggcacgcctttttccttcatctttttgtaaatattcaatgattcgacatcgcggtatgagccgatgtcatcgaattgcggattgcccatgccgatctcttcaccttgataaatgtaaggcgtgccctgcatcatatgaatggccgccgccagcattttggctgatttcgtccggtatacgccgtcgtctccgtatctggatacggcccgcggctggtcatggttgcaccagaataatgcgttccagcctccgcctttttgcatctccgtctgccaaaacgctaaaatccgtttcagcttcagaaaatcaaacggagcgagcgcccatttttcaccattcggataatccacttttaaatggtgaaagttaaaagtcatatcgagttctttattctcagggtttgtgtaccggatgcagtggtccgccgttgtcgaggacatttccccgaccgtcatactgtcatatttcgaaaacacttcccggttcatctcatggagaaattcgtgcacgcgcggcccgtccgtataataagggcgcccgtcacgcccatcctcggcatcaggaaacgattggtctttagaaatgaggttgatcacatccagccggaagccgtcgatccctttccggaaccaaaaatgcatcatgtcgtaaacctgttttctcatctcttcattttcccagttcaaatcggcctgcgacacatcaaataaatgcagatagtgctggcctgacgccgggtcgagctcccaagcggaaccgccgaattttgattcccagttgttcggcgcccgtccgtcttcctttccgtctttccaaatgtaaaaatcccgatacggactgtcgggtgacgagaccgcttctttgaaccaccgatgctcgactgatgtatggtttacgacaagatccatgacgaccttgattcctcttttgtgcgcttcatcgagaaggcgttcaaaatccttcatcgttccgtattcttcaaaaacggtgcagtaatcgcgaatgtcataaccgttgtcattctgcggcgaatcgtaaatcggcgtaagccaaatgacatcaatcaaaagcttctgcaaataatcaagcttctcgataataccgttcagatcaccgatcccgtttcccgtcgtatcattaaagctcttcggataaatttgatataccgctgcctttttccaccatggtgtgctgtctgttttcatttttcttcaccgcctgtaatgttttgaattgaaagggaaaagggacagcctgatagaaggcgccccgcaggttttctatttttgccgtttcagccgcgcatacccgtatgttcccgcaaacgggagaatcagcacgatcagcattccgatcgcaaacggaccccagtaccggctcataatggagaagatccccggcacgccgccgactccgaccgagcttgcgagaacgcctttgacggagatgaacatccccgcgattcccgaactgatcatggcgatcacaaacggaaatttgtaacgcagattcacgccgaaaatcgccggctcggtaatgcccaaatatgcggaaatgccggccgtcagtgaaagcccccgctgttttttatcttttgtaatcagcatcatggccaaagccgccgatccttgagcgatatttgacaatgcgagcatcggccataaaaatgtgccgccgagctttgatccgattaattgaagatcgaccgccagaaacgtatgatgcatccccgtgattacaagcgccgaatacagccctccgtacagcaggcctccgatggcggagaattggccgaaaacggcaatcaatcccgccgtcagcgcgttaccgatcgcaaaggtaatcggaccgatgatgacaaaggatagaaaaccgatgaccaaaagcgtcaccggcgcgacgaccaacagctgaatgccctccggcgtccgtttcgtcaaaaagagctcaagcctggcaagtaaataagccgccagcagaatcgggagcacctgaccttgatatccgactttctgcacctcaaggccgaacaggttccacaccggaatatcgccgttctgctcggcggccccgtagccccatgcgtttaacagatcaggatgcaccagcatcagcccgagcacgatgcccaagagcgggcttcctccgaaccgcttcactgccgaccagccgattaaagccggcagaaaagcgaaggccgtccccgcgatcagattaatcatattggcgagatccgcccattgcggatacacttggacaatcgatttggcgctgtagaaaatgccttccgccgttaagatgttgttcagacccattaacagcccggccgtgacgatcgccggcaagagcggaataaagatgtccgcaagcgttttcacagcacgctgtaaaggattcatgttttgcgccgccgccttcttcacgtcatccttggacgcttcgcccatccccgtttccttcactaattccgcatatactttgttgaccgtcccctgcccgatcacgacttgaaactgcccgtttaccgcaaaagatcctttgacaatgtctattgcatcaagcattttttggtttactttggtttcatctattaatgcaaaccgcaaacgcgtcacacaatgagtcgccgcctcaatattttcgattccgccgacagcttcagcgatctgcctcgcagcccggttaaactcacccatgccaacccctccgtaaccgttttcattttgtctcacaaacttgtttatacatgtttatgactctattgtaatgatgtatatacatgtcgtcaatctatttttatagcgctttcatcacaaatatactgcgaaagaccctgaaacaaaaaaagccccgccggaaccgggccttgacttcttgttttatcgggaacatgtccgggcggaattcacaacaggagcacaaaaagcatacagtactgtacaactaagttaaagaggtgtgaagagatgccatccactgttatcaacctgtactatttgaagattaacagtatttctggcaacggatctattacgattggggaagcggcatacaacagtcccaccacaaataacaaatcacaaggactgaactcttcattcggcgatacgtcacctatagaatcgatgatggagaacttgttaaatgatcctgatgtcaacgaccagacagaaataggaaccgcagataccgcaaatgttatgccggtaccgccgactatagattaaaggggtttttatgaatgccttaccaaattaacgtcgtcaatataaaagtaaacggagcaacgcaaaacggaaacgtcgatatcggtcagaccgtgcaaaacagccacaccgccaacagcaaatttgtcggcgcgaacttttctttaggggatttttcgccggccgccggatgtttgaattcgggccatcttgaccctgacgtgagcgatcaggatcagatcgccaacccgtcaatgccgatcgcaaatcaaatatagggaggttctgccgaagtggatatcgaaaaaatgagaaagtggcttgagattacgaacgagcacaagcccagcgacttttggaccaatgtcctgaaacggaaatctcccgaagattttttctccttacaaaaaaacaccctgacttatgatatttatcaggatgaacagcacacatttgtcattgtggaaatgcccggcgtttacgaagaagaattgacattgaggctgctgtcaagaacacggctgcatataagaggaaacatcacacccctttttccaaagaacatgggcgtctgccaaaaccggtattacggggaaatcgatgagacgattgagcttcctgaaccggctgagccccgcctgttacaggcgcagtgcgtaaacggcctgctccacatttcctacccgcgccttatggagcacattccttttcagaaaaaaatctaaagagccggcttacgggcggcccagccgtctgtacactttctccttataatgagaagatgcgggttttgagaacatggctttctcctccgtcagtttgtcgagtctgacttgtttttccgtccgtttgttccgcaggtgatcccgctcctgttcattgcggcacttggcgatcaaataatcgagcgtcatcagctctttcttcagcgcgccctcatcctcggcgatcccggcgttttttaatatgcggtagcccattctgagcgactccggaagatgtgcggcatcgtctttcggcaggggctttcccattcctttgatgccggcgaactctccatccttaatggcgcgcttgattttatcttcagccacgatatgggcaatatccatcactgttcacctcttttttcaatagaaccgggtatgattaaacggaaacacaaagcccagtttgtgccatttatatgttttaaagctgtcattcaacagatcaacccccgttgcgacagcgtttttcgccctttttccgatgagccttttccaccttttctatttgctggtttcatggtatattgattacgttcgttttttctatcgttccgtgtaaaccgtgatcggaaaaaaggagtgtaacaatgaaaacatttataaaagaaagaggacttgccttcttcttgatagcggtcgtgttattgtgggtgaaaacatatgtcgcttatattttaaactttaacctcggcatagacaacacgatccagaaaatattgctttttgtgaatccgctgagctccagcttgttctttcttggatttgggcttcttttcaagaaaaaattacagcagacagccattattgtgattcattttttattgtcttttttgctttttgcaaacatcgtctattatagattctttaatgatttcattaccatcccggtcatgatgcaggcaaagacaaacggcggccagctcggagacagcgcgttctcgttaatgagatggacagacgccttctacttcctggataccgtcattttgattattttggcccttaagatgaaaaaaccggctgaaaaaccggcgaagaaatcattcagaatcgttttggcttccgccgtgcttgtgttcctgatcaacctcgccgtcgcggaatccgatcgtcctgagcttttgacacgctcatttgaccgaaactatctggtgaaatacttgggcacgtacaactttacgatttacgatgccgtgcagaatgtgaaatcaaacagccagcgcgcgcttgccgattcaagcgatgtaacggatgtggaaaactatatgaaggccaactatgacgtgccgaacaacgtctacttcggaaaagccgaaggaaaaaacgtcatctacgtctcattagagtctctgcaatcctttatcattgactataaaattaacggcaaggaagtgacgccgtttttaaacaaactggcgcacgataatcaaacattctactttgataactttttccaccaaacgggacaaggtaaaacatctgatgcggaatttatgatggagaactctctgtacccgctttcgcaaggttcggttttcgtcaataaagcgcaaaacacgctgcagtccgttcctgcgatcctaaaaggcaaaaagtacacatctgccgctttccacggaaatacgcagactttctggaaccgtaacgaaatgtacaaagcggaaggcatcgataagtttttcgattccgcttattatgacatgagcgaagaaaacacgaaaaactacggcatgaaagataaaccgtatttcaaagaatccatgccgctcttaaagagcctgccgcagccgttctatacgaagttcattacgctgtccaaccacttcccgttcggaatggataaagaagacacggacttcccggcgggagactttggcgattcagtcgtcaataactacttccagtccgcgaactatctggatgaatcaatcgaacagttctttaatgacctgaaaaaagacggcctgtacgataagtcgattatcgtgatgtacggagaccactacggcatctccgaaaaccataataaagcgatggcgaaagtgctcggcaaagatgagatcactgaatacgacaatgcccagcttcagcgggtgccgctctttatccacgctcccggcgtgaaaggcggccgcaatcataaatttgccggtgaagtcgatgttgcgccgaccgttcttcacctgctcggcgtcgatacgaaagattatctcatgtcaggttcagatatcttatcgaaagagcacagagaagtcattccgttccgtaacggagacttcatctcaccgaactatacgaaagtgtccggcaagtattacgatacgaaaaccggaagacttttagatgattcagaagtcgacaaaaaagaagactctctcgtcaagactgagcttgaaatgtctgataagatcatcaacggcgatctgcttcgtttctatcagccgaaaggctttaagaaagtggacccttcacaattcgattatacgaagcgtgaagattcctcagcagatgatcaaaaagaataaacaaaagccagatcatatcaatgatctggcttttttatgttcagctcccggcggcggccatagagcgcttttgcaggctgtcggaaagaactgaataagcgacgactttctttttctgctgtttgacgacatctacatgatcttcgtagctgtatacaaacaccgtcacatctttttttccttttctcgtcttaatgacaagcggatcggctccgttttgcggatgaagataacgctcttcatcccctgggtatatataatgccgttcgataaacacggcatcgttaaaatcatcaatcacccggcgtttgtcttcgccttccagacgttttccgccgagggaaacggcagcggacgcgtcactgagctttgaatggatttcaaacttgcggagaatccattccaccgctccggtaggaaggcatgtcagcaaaatcttaatcaggcttatgacaacaattgaaacaactgcaatccatgtcaccttacatcacctccatacttgttctacatgaatcttaacatagaagaaaacattgttttttgtacattatgtgaaacttgatatatgttcaaaaaaatccggatcacataggtgatccggatttttcaagtctgcttctggtcgtcacggctgacggcttctctcagctcttccgcgacaaattcgacgttcggcccgataatgacctgcgccgttttattccccgttttgataaccccttttgctcccgcttttttaagcgccgcctcattaatgagagacgtatcctgcacggtcagcctgaggcgggtcgcacagtgatcaatcgtttcgaggttttgcctgccgccgagccccttgagcatggcatgttcttcgacggaaccggccgtatcttcactaagcacttcttcctcttcctcatcatcttcccgtcccggcgttttcaagtttaacgttttgatgagcatatagaatacgacaaaatagatcaccgcataacaaagcccgacaacgagcagcaaaagcggtttttcggcaatgccgtagctgaggagataatcgatcgcccccgccgagaatgaaaaacctgacctgattccgagaacattcacgataaataaagagaacccggttaatatagcatgaaccccgtacaaaagcggtgataaaaacataaatgcaaattcaatcggctctgtaattccggtaataaatgccgtcagcgcgagaccgatcatcattccggccgtcgctttgcgcttacttggcttagccgcggcaatcattgccagacatgcggccggaagcccgaacatcataatcgggaagaatcccgtcatataagttcccgccgtcggatccttcgcaaagaagcgggccagatctcccgtttttccatgaaaatcgccaaactggaaccaaaaaatattattcagcacatgatgaagaccgaatggaatcaaaagccggttaaaaatcccgtaaatcccggcgccgattccgccaagcccgatcatccattccccgaaagacgtaatcaccgactgaatcggcggccacacaaatccgaagatccccgccaaaataatggtaatcagcgccgttacaatcggaacgagccggcgcccgctgaaaaacccgagatattcgggcagcttcgtatccttaaagcgattatacatgtatcccgcaattaaccccgcgataatccctccgaaaacggccatattatttgtcgaattgattgattttacagccgcgtccagcatgatataagaaatggctcccgacagagcggcggccccgttgctgtctttcgaaatcccgatcgcgattccgatcgcgaaaatcagcggcagatgatcaaataccgcggtccccgccgcgtaaatgaacggaatatttaataagtcctctctgccgatggccaaaataataccaacggcgggcagaacggcaatcggaagcataaatgattttccgagtttttgcaaaaattgaagcattttacccatcccccttcttttttcttaaatataccacataagttatctagtgatctataccaattttccttcatttattcacataaggcttgttggttttctatttataatccagttgtggtaagcttgaatcagatgattaaaaatagaaagcgggaatgacaatgattgtaacgaacgatcaagaattagaaggccttaaaaaaatcggcagaatcgtcgcgctggcgcgtgaagaaatgaagaaaaaagccgagcccggcatgagcacgaaagatcttgacctgatcggaaaggctgtgcttgacgagcacggagccgcttccgctccggagaaggaatacgatttcccgggcgtgacatgcatcagcgtaaatgacgaagtcgctcacggcatcccgagcgcctctaaaatcttaaaagccggagatcttgtaaatatcgatatttcggcggagtttggcggtttttattccgatacgggaatttcatttgtactcggagaaggcgatgaacgtctgcaaaagctttgtaactgcgcagcatccgcatttcagaaaggattggatcaggcaaaagcaggcaaacgccaaaaccagatcggcagagccgtctaccatgaagcccgctccaacggatttaccgttattaaaacgctgacgggccacggaatcggcagaaaccttcatgaagcgccgaaccacatcatgaattactacgatccgtttgataacgcgctgtttaaaaacggaaccgtgatcgcgcttgagccgtttatttccacgaaagcggaaacgattgttgaagcgggagacggctggacgtttaaaacgccggataaaagccttgtcgcccaagtggaacacaccatcgtgatcacaaaagacaaaccgattattttaactgcattgtaatgtttcatctcccttccaaacaggtatacaacaactaacccgaaggagggagacgcatgaaaaaagataaagaaaaaatcaaaatcgaaaacgaaatacacgccatgcacggcgtaacgaaacagcagattttagaggatttcgaggaatttaaggcgtaccttcatcagaaaatttccgccggaaaaaaactgggtctggatgacagcaaaatcatcaaaagcgccgccatcctcggggactatctcgccaaacacgaggagccccgcaatgcggaagaaaaactcttacaagaactgtggtacattgcggatgacaatgaaaaacagcatttggcccagcttctcgtcaaacttgccggacactgatacagtgcccggcttttttatgctccgttataagagttgtgctacactggacatatgtctgtgaaaggagccatttttcaacatgtggtttattatcttcgggtttattttctttattgaaagcatcattctcaccgtttacggagtgaagaaaaagaaggggatgctgatttatttcggcgtcgttttcggaatcatgacactcggaacggtgctgttaaaattaaccggccattaagcatgaaaagaccgccctttacatatatatgtaagaaagctttacatctctgaatcgaaagtctcagtttttgcattatcccttttcagcgtctttttatagatgttacaatgccaaaagtttggcaaaagctgaagaaacctccccagcgggagaacggagaaaggagttttctgacatgcattatggcagtaaaggctggtatgtagaagagttaaagaaaaaaggaattacccactatgaaggaagaaagcttcaaagcttcaaaaagtacttccttgccaatctgctggaaacaaaaaaacaagcataacgtaaatcagccgtgctgtcagtgcagcacggctttttttctatacattagtgagcctgtctctttttttaaggaaggactccctccagctttctgacagcgcttcttcccgcagtatttcttcaatcgctgacagattgccggaatcacgatatttcacttcattcgcataccagacggaaatgctttcttttcctctcgacagacgcttgaggacgggacgcggatcgacatatccttcttcaagcaccctgaaataaaagccggtaaatcccgtctgctgtacacggagcaccatatctttgatgccatatttgagcgcgagtttgacgcagggctggcgcggctggcttacttgaacgacggcttcccccagctgaaagacgtctccgatccacacgtcttgttcggccagtcctttgaccgttacattctccccgaacgcggcggcgggaagttttctcgcgagcgttgtttcccaatatgaataatgctcggcgggatacacgcacaccgctttatcggggcctccgtgatgcttcaagtcggcttgcccgtccccgtcaaaatgggttttatacagcatgacgggagaatctgcgggccgctttatgatgccggaattgatttgtctgccggcaaattcatgaattgcgggctttccgagattgatagataagacagaatagtcttgcgtcacttcgttcacatcctttgcgaaatctcatatctttcctttatcatagtaagaaaaaggtggtttttccatgcttcaatatcatatgattgcagacggccgggttcagggcgtaggttttcgctacttcgtccagatggaagccgacagacataaggtagccggctgggtaaaaaaccgtgatgacggccgggtggaaatccttgccgaaggtcctgaagagtcgttaaaacaatttgccgaagcagtcagaaaaggcagccccttctcaaatgtcacaggcgtaaccatcgaagaatcacaccgtctgaaagggtaccgcacttttaccatcagttactgataaggcttgtcctgataataataattcggcttcacaatcgtattgtcatatgatttatggaaaatgtgggtggaagccggcgagatcggcggaatcagccaggtccagtcgcccgtcagctttctgcccgcgtcttgttcctgttcttcaaagcgtttaaattgattcgccgccgtatggtgatcgacaatgctgacaccgtgttttttgtatgaatagagcactgccttattcagttccaccagcacctgatccttccacaggtcggtattcaggctggcggaaatccccatgaccgcagcggcttttttgagcatatcataccgtttttcgtcagcaaggttccttgcgccgatttcggttcccatataccatccgttaaaaggcgccgcgttgtacgacagcccgccgatttcaagcctcatatcggcgataatcggaaccccgtaccatctgagatttaaatcggcaaactcttcaatatccggatgggtgatcggcacttctttcacgagcgtctgaggcaggtcataccagaccggctgcccgtcccctttcatccggaaaagcagcggcagaatatcaaaatcggtccgcttcccgcgccagccgagtttttcgcagacagccgtcagctcatatgatgccggatcaccgactcttccattttcagtctcatatcccgcatagcggatgagctgatgattccagatttccacttgcttctccccattcttctcaggggggaaaatcgtaatcgtcggtttaatttttccgccgttcgtggcgatttcaatatgttcaaataatgcgtcgcgcacctcttctttcgtgttcacaccgcgccggtcaatgacgttcagcgattgccagaacagacgcccgatacagcggttgctgttgcgccacgccattttcgccccgtgttcaagctcttccgccgtatggacgtaacttcccgtccgatctatctcatcttttatcgcgtgcagacgcgcgttgatttgcgattccattccgagttcctgatagcagacatcaataaaatccttcgcctcatcccaaagtatttccgtatgtttcaaaaaactctctccttcaatttacatctgtttcccattgtatcgttttcaggagtgaacacaatggtttttttgtatcatactggaaactgcaaagaaaaaacacctgtgatgttcgcaggtgttttacaaaacggaatgcagtttttcagccagtgtaagcaaatcctcacggtagttttttcccgtcatcggaattccgtgacctgtcaaaagcgcttccggctccagttcggccagtttctgaacggatgcggccgccatctgggtatccgctgtaaaataagcgggcggcccgtgaagctcttgcttttgaatgacaacgtccgcaagcgattcctgttcaacagtgatcacggcatcaccggcaagcagaacgcggtctttatcccggaataatgaaatatggccgggggtgtgaccgggcgtatgcacccatttccattcttcaagaaacggaacggtaccgtctgaaggcagtgcctgaacggacggaatgcggatcgtatggcgcggaaacagcggtgacagctttgcgacaagcccttttttcgcatcgggcctggcaggcggataatccgctttccccgtgacgtacgggagctccttttcatgaatgtaaaccggcacatcccaaagctcaagcagctcttcaatcgcaccgacatgatcaaaatgaccgtgtgtcaaaatgaccgccttcagctgatacccctctttgaatcggcgtttcatttcttctgttatcatctccgccgattgcggcattcccgcgtcaaccagaatgatttcccgcggagctgagggattttcgataaagtaaacattcgcaatctgcacggtcagtccgtaaacgccgtccgccgctttaaaaccggccccgcttctcactgaaaaaagcggcataaacggatcactcatcatggcacctcctctgatgcctttagtgtgcgacgaaccgggtgttttatgttaaaaaatcgtgattgcgccgatgatgagcgcaaaggccgtcatgacgataacggcaagcaccgcccatttcatcgcaaatttctggtgttcatcaatcgtgaccccggcaagcccgactaataaatgcgtcgacggcacgagcgggcttaacatatgaatcggctggccgatgatcgaagcgcgggcgatttccaccttatctacaccgtacgccacggcggtctcggataaaatgggcagcacgccgtaaaaataggcgtcattaggcatcagaaacgtaaagataccgctcgttaaggcaacaatcgccggaataaacccccccatctgttccggaataagcgatacgagggaaatggccatctcatcaaccatcttcgtccccgttaaaattccggtaaacacgcctgcggcaaaaatcatcgaaccgatcgcaagcacattgctcgaatgggctgaaatacgctccctttgatcgttaagcttcggatagttgacaatcagcgcaatacaaaacgcaatgatgaacagcacggttaaattcacttttcctgacactaaaaatcccactaaagaaagcgttaacattaaattgaaccaccacagtttcggccgcttccattcatcttccgcagccgcagccgtttcatttgtatgggacggctgctttaattcgatcaccccgagccgtttcctttccatccttccgagtacataagcgaccacaatcatacacaccattccgctcgcaatgacaggcagcatcggccccgtcagctctgccgggtcaacgccgagcgcactcgccgcacgcggcgtcgcgccgccccatggtatcgtgttcatgatacccatgccgacaccggcgattcccgctaaaataatcggacggattccgagcatgatatacaaaggcagcattgcgcttgtcgtaatcatatacgtcgtcgagccgtctccgtccagtgcgacaagcatggtcaaaacggctgttccgactacaattttgagcggatcgcctttaaccagctttaaaatacgcgacaccatcggatcaaataaaccggtatcaatcataatgccgaaataaagaatcgcaaacataatcatgactgcgatcggcgccacctgttcaataccggagatcatcatctcgccgacccggttaaaagaaaacccggcaaacagcgcaaacacgatcggcgttaatacgagcgccgttaacactgaaagccgttttgtcataatcagcaccataaaaacaagcatcataagaaagcctaagattgctaacacagtatgtcccccttatcatgaatacgcttacattttaaaggcccgatcccctttatccgcctttttgctatcttatgagaattggatattgaagtaaatattttggattttaaagatttttaattttttataaccttttcgttcattttgttcatttataaataaaaagcctcccgcaaatatgcggaaggcttatttttcgctgctcatcatctctttataaaactcggtctgctcttctaaaaagcgttttgcgccgctgctgtttttataaaagctctcccaatcccgttttttcagcatttgcttccactccgcggatgaggtaatctgtttcaaagcctgatcccaataggcgatctcgccttcggtcatgtctttcggccccatgatgcctctccagtgcgcaaagacaaacggcaccccctgctctttccatgtcggcacatcgctgaagccggagagccttttgtccgacgtaacggccgccaatgtgattttccctttccgataggcgtctctcgcttctgaaatggtcattgaggcggcgtctatctcgtggctgataagagcttcaatgacttcattgctgctcccgtattgaaaaaagcggatatcaaacggagaaattccggccatttccgccgctctcgcaaaggagagctggtcatcatttccgaggccgggcgcaaatccgatttttatgccgcccggatgtgctttaatatcgccgagcagccgctttccgctttttatctttgaatccttcggaagagcgacggtctgccactcttttgcgataatggccaaaggcgtaaaatcagctgccttcagccggctttgtcccaaaatttcattgcttaacagcaggcttgaattcatactgatgacatccgtttttcgttcgtttacatatttccagccgctgtctccgcctccgccgggtttatagacgatctttacgggccggcctaatatttgcttccgctctattaccgattgcaacgcttttgccgttacgtcccagcccccttgaggcgccgccgggacgacaatttcaaccggcccttcagctgaacggatgcccgccatctgccgtccgtcaaaagaaaccagcgccgccagcatgacaagaagcactcccaaccgcttcatttctcccatcccttattcatgtgctaaataatatttccgttccggcctgccgataatgccgtactctaattcagcgagcgcttcttcctgagaaacgagaaactcggcgtagcgccgcgccgttgttctggaggcgcccattttttcgcccagttcttcagccgtcatccctttttgggctgctctgagcgcgtttttgattttttgaagtgtaattgaattaatcccggtcggcagatcattgagctgtttttgttctttctgaccgcttccgaaaaacatgtcgataacggactggctcagctccggctgtgagtgcagccattctcttttttcacggtactgcaaaagcacttctgtaaatttatgtgccgacaccggctttatgacatagtgggaaacgcctgacctaagcgcttcctgcagcagtcttgtttcggcagaagccgtaataatgatgatatcaacggaaggaaaacggccgcggatgaggggaagcagatctgtccccagctcatcaggcatataaatatccaaaagcagcagatcaggctgccgtttctcaagcagcgatatggtgtctttggcattgattgctttgccgatgacattgaatccatcaagatgttcgataaatttttcgtgaatttgcgctattcgaaagtcgtcctctgcaatcgcgatgttaatcacaccgattccccctttgacctttctttcggtataaacaccgtaaatacggcaccgccgctcttttgctgcgaaatctctatcgatccctgcaattcactgacggcttctttcagattggctaagccgtatcctctcctcgtcccctttgaagagtagcccttttcaaatatcgtttctgttttttcctgaggcacgccgtctcctgaatccgccacttcgatgacgatatccctgccgatatcggtcataaaaaaggcgacctcttttttctctttttcggcgacggcttcgaaagcgttatcaataagatttccgatgatcgtaatgagctgggatgaacccacatgctccggcagcgattctaaaaagctgttttcatctattgaaagcttcactttcttctcagacgcctttcccatttttcctaatagtatggcctgaacccgctgtgaatgaatgttttgaaagaggatttcgtgctgttcattctggatggcgtactcttcttttatcagttcaatggcttcattatattctcccagctctaacagaccgaggatcgcgtaaagcttattcgagaattcatgcgtttgcgcccggagatcctccgagtattttttcatttcagtcagcttgttaatgagtttcttgagctccgttttttcgcggaagctgatcaccgctccgtatacttgtccggtctgcttcatttctttcacgtttaagataaacactttatctccggcacgcacctccacgttcggcggtaattctccccctgccaaaaccggcataagatttgcgcccggcatgatttcttttatatgccttccgatcatcggtgccggaagattcagcatatcagccgcagataaattcatcatggttaccgcgccttctttgtttacggcgataatcccttctttaatcgcaaggagcatcgcattgcgctccctgtacagtgctgcaatttcatgcggttcaaggccgagtgtatctttacgaatgctttttgcgagcgccgccgctcccccgatgccgataagaaacaccaaacatgcaaaatagcctaaatgccgcagatgcgctttcatatctttttctatctcatcttgtaaaaactcgactgtcaccgttccgacgacttcgttatgatttttttcctccaaaataaccggggcgctcccccggacagccttcattccgtcggaaaccggtgacccgccgaacatgacggttttattttgcagattttgattttctttcggaatactgcttcgggccgaatgaaatgcaacatgccctttttgatcagtgatgtagacggcgtgcgcgcctgcctgttctttcatttgttcaatgacatctaactttgtaaaagcctcttgatccgcaagccggaacgcctcttttacaggaggcatgtatgaaatggtttttgccgtttgcaccgccagctgttcagcctgcttctggccttcctttaattgctgaaaggcaaatataaccgtgagcgttccgatgacaagtattaataaagccgtgattaatccggcgattttcatttgcagagagacataaaaccgcttcgcttccaacacagcaccagccgtcctttcctcctaaaatcataccattttttaaatcttcatttctcatttttgagaattttcgtgatctttttctcttgtggcttaccaaaaaggtgatgatagatatatatttacttttacacaattgatataacacataaaaaagactgaccgaagtcagtctggcaatctatcaggaaatcgtaactcccgcgcttgcatatcccgccactgtattaataagcgaaaggcctgtcgcagtggcggagaataccattaacagccgggtttgaggagttaccgcaatgttcagccctgtcgtgattccgttgctgatgctgccgattgacaatacgccggtgaggggaggagctaaagtgacggatgctccgggaatcggcgtgaacgtattattcggcactgtggaactgtataattgtgcggttatcgtaacagtcgagccgacaagcgacaatgctgcggttgtactgaaataggcggcaattgatgtaatggttccgcttctcggaacagaaaaagcaaagttcagcagagtccctccggctcctgtaagatcaattgcgcctccccctccgacattgacgcccgtcacagaattgccgaacccgacaaggctcaccgttccgattaatccgccggcaatggtcgtcacggcagttgggagacctgaagcatagggaatgatcgcgcctgctccggtggctccggttgctccagtcgaacctgttacccctgtggctcccgttactcccgtggctcccgttactccggtggctccagtatctccggttactcccgttaccccggtggctccggttaccccggttactcctgttgcgccggttaccccagttgctcctgttactcctgttgccccggtcgctccggttactcctgttgctccagtatctccggttactcccgtggctcccgttactcctgttgctccagttgcgccggttactcccgttactcccgttactcccgttactcccgttactcccgttaccccggtggctccggttgccccggtggcgccggtgagcccggttactcccgttatcccggttactcctgttgccccggtggctcccgttatcccagctgcgccggttactccggttactcccgttactccagtggctcccgttgccccagttgcacctgttactccggttgctcccgttactccagtggctcccgttgccccagtcgatccagtatctccggttgctcccgttaccccggttgctccggtggctcctgttactccggtgagcccggttgctccggttactccggtcgctcccattattccagttgcgccggttactccggtcgctcccgttatcccagttgcgcctgttactccggttgttcccgttaccccagttgcacctgttactccggtcgctccggttaccccggttgcgccggttactccggtcgctccggttaccccggttgcgccggttattccagtcgagcctgttactccggttgagcctgttactcccgttgctcccgttaccccagttgctcccgttaccccagttgcccccgttaccccggtggcgccggttamtcccgttgctcccgttaccccagttgctcccgttatcccagttgcaccggttactcccgttgctcccgttaccccagttgcgccggttgctccggttaatcccattgctcccgttatcccagttgcgccggttactccggttgctcctaataccccagttgcccccgttaccccggtggcgccggtgatcccagttgcgccggttactccggttgttcccgttaccccagttgcacctgttactccggttactccggttgctccagtatccccggttacccccgttactccggttgggcctgttactccggtggcgcctgttaccccggtggcgcctgttaccccagtatccccggttacaccggtagcacctgttactccggtgagcccggttgctcctgttaaccctgttgctcccgttacaccagtggctcctgttattccggtcgctccggttactcccgttaccccggtggccccggtaatcccggttgctccagttactccagtatccccggttacaccggtagcacctgttactccggttgctcccgttaccccggtcgatccggttactccggttactccggtcgctcccgttatcccagttgcgccggttactccggtcgctcccattattccagttgcgccggttactccggtcgctcccgttatcccagttgcgccggttactccggtcgctcccgttaccccagttgcacctgttactccggtcgctccggttactccagtggcgcctgttactcccgttaccccggtggcgccggttaatcccgttgctcccgttaccccagttgcccccgttaccccggtggcaccggttattccagtcgcgccggttgctccggtcgagcctgttactcccgttgctcccgttactcccgtggcgccggttgctccagtcgcgccgggatctccagtgacgccggttaccccagtcgctccggtattcccggtcgagcccgttgctccagtgaatcccgttgctccagtaaaccccgttgctccggtcagccccgttgctccggtgaatcctcttacatgaaaatgatttggatgacagcatggacaccatctttcatgacagcaagaagtcttgcaacagaattcttcacagcagtgggcccgattttgataactgcgcctttgatttcttcttttatgttgaaaatgacagcaacactcattactattccggcagtcgtaatcccaagagtcgtatctgttataccaagtatctccttttctcattacaccacctctatttgcataatatttccacaagaaaaaaaggtgtggcaaaatcccacttctattgggcaaatttttaaatgttctttaaggctgcatcatgcagcatttacagaaaaaaagacctaactttgcataagtcaggtctttcatctttaaaatatcagactgctgttgtcattaggttgtcgggaaacgaatgctgttaaaatcgatattgagagctgtcgctgttgttatattattcgcagttatgaaaataactctcagctggtacgtatttgttcctgcggtcggtgctgtatccactgttgtatcagcaattgaaaaactatccgtagctgcgagagtactggttcgcgacagagttcttgtatgaatttgcactgctcccctatataatctcacttcataaacaaagtttgaattggctgcagttgttaacgcgacactgagtgcataatcaagctttacattctgcaaagcattaaccgggactgccagcgtagcaacgggaacttctgtatttaacggcggataaacagtgagcggcccgttggttcttgtgaagagcaaggttggtgtactgcctgtggcgccggttgggcctgttactcctgtggctccggttgggccagttgctccggttggccctgttgcgccggtcgatcctgttgcgccggtgagcccggttgctcctgttactccagttactcccgttgctccagttactcccgttgctccagttactcccgttgctcccgttgctcccgttgctccagttactcccgttgctccagttactcccgttgctccagttactcccgttgctccagttactcccgttgctccagttactcccgttgctccagtcaagccggttgggcccgttattccggttactccggtcgatccggttgagcctgttggccctgttgcaccggttggtccggtcgctccagttgaaccggtcgctccggtggctccggtgagcccggttgctcccgttactcctgtggctcctgttgctccagttagtcctgttacaccagttattcccgttactccagttggaccagttggaccagttggaccagttgctccggtttctcctgttacccctgttgcgccagtcgctccggttatccccgttgacccagtcactccagttgatcctgttgatcccgtcactcctgtggctccggttagtcctgttacaccagttattcccgttacaccagttggaccagttgctccggttgaacctgttactcctgttgccccagtcactccagttgctccggttgatcccgttactccggtggctccagtcacacccgttgaaccggttgggcctgtcgatcccgttgaaccggtttctcctgttaagccggttgggcctgtcgcgcctgttattccagttagcccggttacaccagttgcgcctgttgctccggttgcgcccgttattccggtcgctcctgttgcacctgttatacccgttgctccagtccctccagttgctccggtttctccagtcggtcctgttgagcccgttactcccgttactcccgttgccccagttactcctgttgagcccgtggttccggtttcaccggttgaaccagttgaccctgttggacctgttgctccggttgagcccgtggttccggtttcaccggttgaaccagttgaccctgttggacctgttggacctgttactccagttgatcccgttgagccagtcgcgccggtttctccggttactccggttggaccggtctctccagttgggccggtttctccggttactccggttggaccggtctctccagttgggccgatttctccagttacccccgttgcccctgttgcgcctgttgatcctgtcgcccctgttgcgccggttgatcccgttgctcctgttgggccggtcgagccagtttctcccgttgccccagtcattccagttgccccagtcactccagttgcaccggtttctccagtagctccggtatccccggtcgagccagtttctccggttgaaccagtcactccagtgactccggttgctcctgtcggtcctgttgctccagtcgagccagtttctcccgttgccccagtcattccagttgccccagtcactccagttgcaccggtttctccagtagctccggtatcccctgtcgagccagtttctccggttgaaccagtcactccagtgactccggttgctcctgtcggtcctgttgctcctgtcgagccagtttctcccgttgccccagtcactccagttgcaccggtttctccagtagccccggtatcccctgtcgagccagtttctcccgttacaccagtcactccagtgactccggttgctcctgtcggtcctgttgctcctgtcgagccagtttctcccgttgccccagttgcacctgttgatccggttgctcccgttgagccggttgggccggtcgatcccgttacaccagttgggccggtttctccggttgaacctgttactccagttgatcccgttacaccagttatccccgttacaccagttggacccgttgctccggttgagccggtttctcccgttacgccggttgtgccggttgtgccggttgtgcctgtcgatcccgttgctccggtttctcctgtcgccccagtcacacccgttgcgccagtcacacccgttggaccggttggccctgttactcctgttgggccggttgaaccggttgtgcctgtcgatcccgttgggcctgttattccggttgtaccggttgcgccagtcgctccagttgcaccgatttctcctgttgagccagtaacccctgttgggccagtcacacctgttgggcccgtcgcgcctgttattccagttagcccggttacaccagttgcgcctgttgctccggttgttcccgttattccggtcgctcctgttgcaccggttgagcccgtgaccccagttgggccggttgatcctgttggacccgtgattccggttggaccggtttctccagtcggtcctgttgctccagtcggccctgttgctccagtcgagccggttgttcccgttactcctgctgggccggtttctccagtagctccggtttctccggttgcgccagtaactccagttggaacggttgtgcctgttggcccggttggacctgttattccggttgctcccgttgaaccagttgagccggtttctcctgtttctccggttggaccggttggaccagttacaccagttgagccggtttctccggttggacccgttactcccgttgcaccagtttctccggttgagcccgtgaccccagttgggcctgttgcgccggtcgctccggttgagcccgtggttccggtttctcctgttggccctgttgcgccggttggacctgtcgatcctgttgcaccggttgagccagttgggccggtcgatcccgttgcacctgttgctccggttgaaccagttactccggttgggccgatctctcccgttgggccgatttctccagttacacccgttgccccagttgggccggtttctccgattgaacctgttgctccggttggaccggtctctcccgtcgggccgatttctccagttacacccgttgcccctgttgggccagttgatcccgttactcctgttgggccggtttctccagtagctccggtatccccggtcgagccagtttctccggttgcaccggttgaacctgttgctccggttgagccagtcgctcctgttacaccggttgggccggttgatcctgttggacccgtgattccggttgggcctgttattcctgttgctccggtttctcctgttgagccagtcgcgccggttataccagttgggcctgttgagcccgtggttccggtttctcctgttggccctgttgcgccggttgggccagtttctcccgttgcaccggttacacctgttgagcccgttacaccagttggacccgttactccggttgagccggtttctcccgttgagccagttgagccagtcgcgccggttgaacctgttactcctgtggatcccgttactcctgctgggccggtttctcctgttgggccagttactcccgttactccggttactcctcttgctcccgttgctcccgttgctccggtcgatccggttgggcctgttattcctgttgctccggtttctccggtcgccccagttactcccgttgctccagtcacacccgttgcaccggttgggcctgttactcctgttactccagttgatcccgttgcgccagtcgctccggttgaaccggttacaccagttgcgcctgttgagccggttgctccagttaccccagttgcgcctgttgagccggttgctccagttaccccagttgcgcctgttgagccggttgctccagttacccccgttgatcctgttgagcccgttgcaccagtcgttccggttactccggttccacctgttgcgcctgttgagccggttattccagttataccagttgatcccgttggacctgtttccccagttacacctgttgggccggttgggccggtttctccagttatacctgtcgccccagtttcccctgttattccggttgtacctgtcactcccgttggtccagtctcccccgttggaccggtcgagcctgttattccggtcgctcctgttgttcccgttctcccggttacacccgtgaccccagtcgatcctgtcgatcccgttactcctgctgggccggttactcccgtcgcaccggtttctcctgttgctccagtcactccggttgagccagtagctccggtatccccggtcgagccagttactccggttgccccagtcactccagttgcacctgttgatcccgttactccggtttctcctgtcgatcctgttgctcctgttattccggttgagcctgttgatcccgttggaccggcctctcccgttgggccggttgatccggttacacccgttaccccagtcgctcctgttatccccgtcgcaccagttgagccggttgcgcctgtcggtccggttgttcccgttccccctgttattcctgttgacccgcttactccggttggaccagttacaccagtcgctcctgttggaccggtcaagccggttgggcccgttgcaccagttactccggtcgctcctcttactccagtcactccggttgagcccgtagttccggttgctcccgttgcaccagttactccggtcgctcctcttgctccagttactccggttgagccagtggttccggttgctcctcttgctcctgttacaccagtcgagccggtagctccagttactcccgtcgcccctgttactcctgtcggaccagtcattccggttgggccggttacacccgttgatcctgtcgacccgattgagccggttactcctgtgggacctgttactccagttgcccctgttactccggttgatccagtcattccagtcgacccagtcgctcctcttgctccagtcactccggttgagcccgtggttccggttgctcctcttgctcctgttacaccagtcgagccggtagctccagttactccggttgctccggtcgctcctcttgctccggtcactcctgtggggcccgtcactcctgtgggacctgtaattcccgttacgccaggttcacccccggtttgcgccaatgaaacatcgtctattaaaaccgttccggaagaaactttacttactacaatgacggcaaaggccgcgccagaaggcacagtacttgttttatagatttcagaccatgtgtgaaagagcacgttcggcaaatttccgggtgtaatattttcttgaatggcactgatttgttcacctgctgcgctgacatatatgatctggagagtgacttggggacttggctcatttccgagcgttgcgagtgatatgaatagagtcactgacttggctgtaattggaacgatttgactgaggtaagcatatggctgagctccaataaattgcgcagaatatctccctgaatgtgcaaacaaactgttaatctgggtatttgccgaactccaccccgctaatgtgccggtttcaaagcttccgtttataatcggattattcattcaatctttttccctctccttcccgttgttgaccgtcttacttattaagacagcatattaatacgggctgtgttttgacaatctaaataaaaaaggtgatttcttttcatcaccttaatccgatccttgaatggggaatcccgtcgcaatgagggagcggtttgccgctgcgacttgtgttacgtaattcgaagaaaggacggataaatagagctgatacgcggctgtttcatccgccttcatttcgtcgatgtacgtaaaaggaattcctatgatttgcccgcctgaagaaaagaggttctgctcttgtctctgtgtttgtatcgatacgccatttctttgcagctcgagagctaagaccaatgagaaatgagacgcgagcggatctaattccacatttacttgtatgacggcatccgttttcaccaattgatctgtcggcgcggctatcactgtgcttaacacgtttatcggtgttccttctaacggaatcatcatctggtctgctgtattttgaaaagctacagccggaaccgctcccgggggcccctcaggccccgggggaccgggcggacccgcctccccttgcggaccgcgggcgccggcgggtcctcttttgccttcgggacctcgcagcccgggtacgcacaaggcagatcgattttcatctgaagacggaaaccgtttttccgtccctgtttccggactttcaagttcacatggtaattgttcataccggtgtttcatatgtctgctcatatatttgtaaggtttctgtttcaatatcatgtattgattacggccgctgctcatattatcaccccggtcatattctattcgcactggagtcatcatgtgcaggcccttccccttccttacagaaataaaaaaaggcagacctgagtctgcctttttcttctaccataaccctaatactttccaccataatccgccgatcacaagccatgtcacaatatggacgattgacaggataaagccgatggaccaccatttgctttgcgatatataacccgctccgaaaaagaccggagccgctcctgagccgtaatgcgtcgtcgaaccgaaaaggttgctgaaaaacgccaggctgagcgccgccaacagcggcggagcgcctgccgccacgatgacggcgagaaatgccgcatacatggcgctgatatgcgcggttgcgctcgcaaagaagtaatgcgtgtaataatacacgacaatcagaatcataaatgccacaatccatgaaaaaccggaaacagaagatttcatcatattgctgaaccaagacaccatgccgagctcattcaggaaattcgccagcatcacaagcgccgcgaaccaagtcagcgtatcccatgcaccttgttcctttttgatgtcctcccatgttaatacctgtgacaaaagcaaaacggataatccgatcagggccgtcgtcgttgcgtcaatatttaagcttcctccgaaaatccacagcgcaagcaccaataaaaagacgatgaccatggagagttcggattttttaaacggacccatttctttcaatttttccgttgcgattttagccgcatccggtgtttctttaatttccggcggatacagcttataaatgaccagcggcgtaatgattaagctcgccaatcccggtacaatggctgcgattgcccagcttgtccatgtgatgtccacccctgcgacatcgtgggccagcttggcgatcagcgggttcgccgccattgccgtcaaaaacatcgcagacgtaatcaagtttccttgaaaaccggtttttaataagaaagcgccgattttccgctctgttccgtctgccggcgttgatccgaaagtttcggataatgatctgataataggaaaaataatgccgcccgcccgtgccgtgttgctcggaatggcaggtgataaaattaaatcactgaaaagcagtgaataagaaaggccgagtgttttcttcccgaaccgttgtacgaatacgtaagaaatcctggcgccgagcccggttttgataaatccccgggaaataaaaaaggcgatgacaatcagccagattgtcttgtttccaaatccgcttaacgtattttcaatagatagcgttcccgttaacgcggtgactgccaatgcaaaaattgcaattgcgcccattggcaagggcttggagataaagccgataattgttgcgacaaaaatagcgaacaaatgccatgctttaggttcaagtccggacggcgcgggaataaaccaaatgattaatcccacagcaacagtaataagcaaaggaatgatttttactgcctgctgtttttttgcgtctttttctgaagccattacaggtctcctcctattttgttgtcttccatcccctatcccattttactacttaactaagttaataaacgtttttgttaattaaaaaacacaaaggaatattttcctttgtgtttcttgtttattattttaatatgcccgccccggctttagatataacatctgattttacatttgatgatgagccgatggaaccgtgcaatgacggtgtccagccgacggactgacttaatccgttggcggctgacgcgttaattgaggcgccgtttaaaagagtgccgtcttcatgaagcgcttttccgccgctgaagacgctgatgactttatcagcagccagccccggcacttcaaagacattattctgggcatatatttttgacgcgcggcccgcgccccacgcatagctgaacgggtatgcggcgcttttagagcctgcgtaaaaattattataaatatgaacctgcccgaaccggacccgcggcgcgcgctggacaatgttctggtaatagttatggtgaatggtcaccttcagttttccttcatccgacgtcttgctgtcgctgttaccgatgacggagcctttgtcatggtcatgatatttattataggacaatgtaatataattcgccccgttggctatatccgtctggccgtcatggtgctgatattttctcccgtaatagtagggaaaactgctgtcgggattcgatccgtcattaaaggtgcaatgatcgatccagatgtgcgtcgcgccgttaatggtgatattgtcatattccgagttccagttgccgctgctgccgtccgtcgggtcccattgcggaaaatagtcgtaagcgtcttgaaattcaatgttgcggatgatgacattgtcgacgccgttcttaatattaaaattcccgcctgtcactttggcatttgaacccgagccgatgatcgtcgtatttgaaggaatgtcaaccacgacccgtgccttctgatttttttgcgatcgctgtctggcgtcttcctgggtgcctgacggcgctttttttccccatttgtccgggtcgtacgccttcagataggcgttcggatcatatgccggatctttataatcatgaaagccgagcgttttattgcggtcgtccgtattcatattgattgtgccttgtatgtaaataatcttcggcgtgctgttggcgcttccccctaatgcagaaacgagctgctgtctgtttgatacggtgtatacattcgatgaagaggctttcgcgccgccggttgtcccgccggaagcggctccccagccgtcatttgttcctaacgtctgccgtcccagatcagcggcatagacgtccgcagggatcatacataaacaaaccgccagcataaataacatttttttcatgaattgtgctcctcctgattctttgttccaatttattacaattgaattgtatcaaatcagttgagaaacagcaccgaaaatgtacagaatgtgcctttcggttttattgcggaaaccgcaaaaaaatcccaagggaccgaaaaccccttgggatctgttcagcttacgcccatgatttcactttttcgttatccgtgacaaacagaagaacttttccttcatctaagcgcttttcaaattgtgatgcttcctcttccgaaaagccgatttcgtgaattttgttgcggagctcgtcgccttttttattaaacatattgccgactgcgtgtttaatgcccgtttctttcgctccgatggtattgacatcagtattatcggccaggcggtccgttctgtcgtcatcatgagaaagcacatatacgtcttcttttgcgacacccaattgctgaagctcttttacgtcctgcatcagtttttgatcatttgtatattctcttactaccggtttcattgataagtcctcccttttgtttttgtatattggatgtttacccgatcaatcaaggatcaaacaaaagaaagagagttcagtgggaaaacgggcagattgtcggtggatattttctggcgggacatgttacagtagaaaaagcaacttttatcagaaaaataaaaatcttcttgagccgattaagcagggaggtggttcctattcattacttttcaccggaacagcgatttaacgcttgggttgtcagtgatttagtgaagcaggtattccgccggcatacccgctgcccggatggaataaaagagcttacggcctttgctgaagatacttttcatattaatatcgatttcgttttctctatcattatcaatatcggtgatatcgaatccgttctgccggcagaaattgaaaataggctgggttcttatctgaccgcgcttcagcccgtgattaccgctgacatgcttcattcttcaaaaacaaatgcctatgaatatttggaacatgagaaaaacaccgatgtgtatcggttattctattcaatatgcatataaggaaagaagggccctggcccttctttttttatggccgctgacggtttgattttgtaattgggaaatggttcgtgttacatttggaacaaccacttatcttgaaggaggattcagtatgccgaatcatcagcagcaaattcaattggcaagacgccccaaaggcgttcccgcccatgacgatttccgctttgaaacgattgccgtgcccgaaccgaaagacggcgaagtgcttgtgaaaacgagttatgtgtccgttgatccgtacatgcgcggacggatgcaggatacaaaatcatatgtagagccgttcgctttagatgaagccataacaggcggagtgattgccgaggttctgacagacggcgataagctgaaaaaaggagatgttgtgatcggaaatctcgcgtggcaggaatattcagccgtcaacgagtccgccctccgcaagttggatacggatatcgcacccgcccaggcgtatctcggcattttagggatgaccggactgaccgcttacttcgggctgctcgatatcggccgtccgaaaaaaggcgaaaccgtcgtcgtttcaggcgcggcgggcgccgtcggctcaacagtcggacagattgccaaaatcaaaggggcgcgggttgtcggcatcgccggatctgatgaaaaaatcgcgtatttgaaagaggagcttcaatttgatgaagccattaattacaaaacggcggatgatattcaaaaagcgctggaacaggcatgtcctgacggcgtcgatgtctattttgacaatgtcggcggaccgatttcagatgcggtgataaacctgctgaatgaattcgcccgcattccggtatgcggagcgatctcatcgtacaataccgaaagtgaagaagaagacatgggcccccgcgtccagccgaagctgatcaaaacaaaagcgctgatgcagggattcatcgtcagtgattatgctgatcgcttttccgaaggtgcgaaacaattggccgaatggcttaaggatggaaagcttcattatgaagaaacgattacggaaggattcagcaatattcctgacgcgttcctcggtctgtttaaaggagaaaacaaaggcaaacagatcatcaaagtcagtgatctaagttaacatgatgatgaaaaaaggagggctttgtcccctccttttctttttttttcggatcagccgcgaagaatcaaagtaagaaagccgtcttcatcaggctccgtatcttccaaagtgaatcctgctgcttgaaagcaggctaaactgatttgattgtctttttcgatgcttgccgcccattcccgcacgctggtaaacccaggatcagtcagcagttttttcaagatctgttttccgtacccttgaagctggtacaaaggattgacgatcaatccgatatacgcccgctcctccgcaaactctatagagaccatgcctgtcggacactccccgtcgtatgccataatgacagtatcgtcttcatctttactcaatcgtgcataccacgcgtctaatggcagcatcgcatccattctccgtctgatattatcgttcttaaaccagtgttcaagtattttcagctcacgttccttcaatatttgaaatctgtctattgaaaccatcttcccgccccccgcctgaaccttttctattattttacaacaaaaaaaacgaagggcttcccgccctccgtttcttatttctcagataattttccgcctgaataaacggcctctttcagctcaattccgagtgatttggccatttttttcaatttggattcttccatcggcgtgacaaggctgagtacggttccttctttaccggcccgccccgtccggcctgatctgtgaatgtacccgtcttcattcgggatgtccgcgtgaatgacgtacggaagatcatcgatatcgagtccgcgcgccgcaatgtcagtcgccagaagcagcggaaattctccccgttcaaacgctgataatatctttgcccgctccatttttttcgcttctccgtgcaggatgccgagatccacatggtgataggcgagtttttccgcatagacgcttaaatttccgatatctctgacgaacacgagcgcctgcatgccgttcagccgtgacagcttttgcaatagcttcactttatcccgctgatcgcagacgagatattgatgcgtgacgcgcgctttttccgccgtattccgctccactttcaaaacggccggttcgtgtgcgatggtattcagcacctgttctgtttccggctgcagcgtagcggaaaagcttaaaagctgtcggtctttcagcgtcgttttaatgatttttttcatcgtttcgcggtgttcctgtgtcacgagctgatccgcttcatcaagaacgatcgtcttgacttcatgcattttcagctttttcgcctgaatcaattcgagcaccctgcccggtgtgcccgcaatgatatgcggtttatttttgagcttttccacctgctttttcacgtttgctccgccgatcaaagacaaagcgcgaagatcagagccttttatccactcctgaatcacttgaaaaatctgcatcacaagttcgcgggacggtgctaaaatgatcacttgcggatgtttctgttccgggttgatccgctccagaaccggaagcgtgtacgccaatgtttttcccgttcccgtcggggattcggcgatgacgtctttcccttccataatcacctgagcggctttttcctgaataacggtcggctcctgaaaacctgacgcctcccagttttcggcgataaatggttgtgtatgctgtaaaaatggccatgtttgggtcatgtcgttctcctcaattcttaaaatctactccatagtatctcaaatgcacgcgccaaacgcaattttctttttccttccaagccttttaacaaacggtctcctcctttataatcataaatgagaaagacacaagataaaaaatgcgtgtctgataacgatagaggtgtaatgatgagtattttatccgtaaaagatttaagccacggctttggtgaccgtgcgctttttaacaatgtatcgttccgtcttttaaaaggggagcacgtcggcttaatcggagcaaacggcgaaggcaaatcaacgtttatgaatattattaccggaaagcttgagcctgatgagggtaaagttgaatgggcgaaaaacgtgcgcgtcggctacctcgatcagcataccgtgcttgaaaaaggaaaaacgatccgcgacgtgctgaaagatgcgttccattacttatttgcgatggaagaggaaatgaatgaaatttacaacaaaatgggcgaagcggaccctgatgagcttgagcagctgcttgaagatgtcggtgtcattcaagacgccctgacaaacaatgacttctacgtgattgacagcaaagttgaagaaatcgcccgcggcctcggcctgcaggatgtcggacttgaccgcgacgtcactgatttaagcggcggacagcggacgaaagtgctgctcgccaagctgcttttggaaaaaccggaaattcttctgttggacgaaccgaccaactaccttgatgagcagcatattgaatggctgaaacgctatttgcaggaatatgaaaatgcgttcatcttaatttctcacgacattccgtttttaaacagcgtgatcaatttgatttatcatgtggaaaatcaggagctgactcgttatgtcggcgactaccatcagtttatggaagtctacgaagtgaaaaaacagcagctcgaagccgcctataaaaaacagcagcaggaagtggctgagctgaaagatttcgtcgcccgtaacaaagcgcgggtcagcacgagaaatatggcgatgtcccgccagaaaaagcttgataagatggatatgatcgaactggcggccgaaaaaccgaaaccggaattccatttcaagcctgcgagaacgtcaggcaagctcatttttgaaacgaaggacttagtcatcggctacgatactccgctgtcacgcccgctcaatctcagaatggagcgcggacagaaagtcgccctgtacggcgcaaacggcatcgggaagacgacgctgttaaagagcctgctcggtgaaatccagccgctggaaggcacggtggaacggggcgagcatcaatacacgggctatttcgagcaggaagtgaaagaaaccaataacaatacgtgcatcgaagaagtgtggagcgaatttccttcctttacccagtatgaaatccgcgccgccctcgccaaatgcggcctgacgaccaaacacattgaaagccgcgtctccgttctcagcggaggagaaaaagcgaaggtcagactgtgcaagctgatcaattcagaaacaaacctgctcgtgcttgacgaaccgacaaaccacctggatgtcgatgcgaaagaagagctgaaacgcgcgctgaaagaatacaaaggctccattctgctgatttcccacgaacccgagttctacatggatatcgcgacggaaacatggaattgtgaatcttggacgacgaaagtgctgtaaacacaaaaaggaactcccgcctgtgcggaagttccttttttttcttaatgtccggcttttattccggcgagatgtttgcgtcccatgagaaggacaagcatgccgacaaaaacgacgatcccgcctactgtatatggagtgcttgcggtgaagtgttctgacagcattcccgcaatccacggagcgagcgcaccgccgataaaacggactgagctgtaggctgaagacgcgattgaacgttcaaccggcgcagaacccatcacagcggttgtcatgatcgtattcaccataccgagaacagcaccggcgacaacgatacatgtaatgatcaacgtctgatggtcagtccagatccccatgacgatgagaatgaccgcaaacgcgataaagagaacgacgagcgaacccactgttcccagcgctttgtgcacgagcggcgccgtaaagactgacgtaattgccagcaataacccccagccgaagaagacatatccaaggccgtgttcatctaaatccagcacgaacggagaataagcaagcaaaataaaaaatccaaagttgtataagaatgcagatactgccattgttaaaaggcctttatatttgagcgccttcatcgcatcaaacacaccgacgcgtttcgccggtttcggcagcttcggcagcatgagtgaaatcgcgcaaagcgctatgaacataaggacagatactccgaagaacggagcgcgccatgagatgctgccaagctctccgccggcaagcggcccgacggaaatccccaagccgagcgcagcctcatacagaataatggctttggcgctgccgccgactgataccccgacaatgacggcaagcgcggttgaaataaagagagcattcccaagcccccagccgccgcggtagccgacaagctgagcgattgaacttgagcttccgccgagggcggcaaacacgatgatgaaaataagtccgagaagcagcgtccatttcgcgccgatccggctggaaatcgcgccggagaaaaacatcataaaaccggtaacgagtaaataacttgtaaataacagagatacttcactaggtgaagcatgtaattgtgcggcaatcgccggaagaatcggatcgacaagaccgattcccataaaggaaataacacaggcaaacgcaaccgcccaaacggctttcggctggctgaataagcctgttttctgttgtgatgatgtatccatttgaccagacctcctgtttcatccattaaaagaaacgctatatccatagcgtttacagcaaaatcattcgattgattgaatggcgcggtcagctttttctttcattccgttaaggcgcgttttaaaatgctgaaatgtgctgatcttctcatcaatcatctcaagctggtggttcaaagcgtgctgaatctcttccagcttttctttccgttccttcggatccagtgacaacaagtacccctctttgtttaattccagctgacggctcatctccataaactgctgaagctcctgaagggaaaaaccgagcacttcttttgtgctggtgactttttcgagctcctccatatcatcttcagagtaaagccggacgccgccttctgtccgtttaggagcaggaatcaaaccaatctcctcgtaaaaacgaatggttcgttttgtcaatccgcttcgcttggcaacttgatcaatcttcatccattccaaggtgaatccccctcttgtcgtatctgtttctattatacaccatttgaaccttaacgtaaacgttaactttttatgcctgataaactttgcttggacaaaacgtttgtctttaaagcgccgggagacatctgtgtaagataaaaaaagccggtatgacccgccagctttctcgggggccgtaccggcttttcttaattctcaagttcttcaatcatcagtgacaattcggtccagcgctccatcgccgcttcaagctcttcagccgtttttgcctgttcggccatcagttcttgaatctttccgaaatcacttcccgcttcagcgatttccgcttccagacgctgatgcttttcttcaaggccggcgattttgtcttcgatgccgtcccattcgatctgatccttatatgaaagctttttgcgctttttcttcggctcttcctccgcctttttctcttcggccggctgttttaccgccgtcttcttcgcttttgcgtattccatgtattcactgtacgaaccttggaaacgggaaatgacgccttgtccttcaaatacgatcaggcggtcaatgacgcggtcaaggaaatagcggtcatgggatacggtgatgacgacgccggggaactgttcgatataatcttcgagcacgcttaatgtttccgtgtccagatcattggtcggctcatctaaaaacagcacattcggttcctgcatcagtacattcagcaagtacagacggcgcttttccccgcccgacagctttctgatatatgtctgctgcatcggacgcgggaacagaaaacgctcaagcatttgttccgcggtgatgacatcgccttccgccgttttgacgatttcagccgtctcttttatatattcaatgactttcatatcaccgttcatttcgctgtggtcctgggtgtagtagccgatccggaccgtctgcccgatggtgatactgccgctgtcaggctgaattctgccggcgaggctgtttaaaagtgtcgttttcccgattccgttcggcccgatgatgccgattcgttcccccgggatgacaagctcattaaaccggctgatcagcgcttggccgttataggtaatggcgacgttatcggcttcgatcacctgttttccgagacggtgggaaccgatcgcgaaatcgagtgatccggagactgccggccctttttgctctttgagcgcctccgctctgtccactctcgctttttgtttcgtcgagcgcgctttcgcccctcttctgagccacgccaattcgcggcgcaggaggttttgacgttttgtttctttctgctccgccagcgcttcccgttcggcccgtttttccaggaatacttcatagtttcctttatacgtataaaggctgcctctctcaagctcgtaaattctgttcgtcaccctgttcagaaaatatctgtcgtgcgtgacaagcataacagcgcccggatattgcgataagtagccttccagccattcaatcgtttcattgtccaagtggtttgtcggttcatccaaaatgagcaggtcagccggctggatgacgtttttcgcaatcgcgacgcgctttctctggccgccggacagctcgctgacatccttcatcagatcggtgacgccaagtttggttaaaaccgttttggctaacgtattcgcctcccacgcatcattcgcgtccattcgggcctgcgcatcaagcagctgtttctggcgctggtcattttccggttcttcattcagcgcctgaagcgctttttcgtattctctcatcgttctcatgacggctgatccgccggaataaatatgctcaagtacggtttgtccggccggaagctcagggtcctgatgcaaaaactcaatatgcacgtttcctgaggccgtaatctcgccttcctccgttgattcaaggccggcaatggttttcagaagcgtagacttccccgttccgttcgggccgattaaaccgattctttcattctcttcaatatgaaaggagatatggtcgaataatgtcttatctccgtatgttttataaaggttttccgcttttatgatgctcatggtccctatcaatcctcacgtaagttcatgtgttcattttaaatcaggcgctggaataaaactagtaaaaggacagacaaatttcttggaagagatcattttgtccgaagaatgtttccgcctctccttttatacactggaggtgaagaggtgatgacatgatcagcgtcagtttgtgcgttatcgtgaaaaatgaagaggaagtgcttgcgggctgtcttgattccgtcaaagacattgcggatgaaattgtgattgctgatacgggctcgaccgaccggacgaaagaaatcgcggcccgttatacggataagatttatgattttgaatggatcgatcactttgcggccgcccgtaactttgtgttttcgaaagcggaaatggattatattctgtggctggacgccgacgatatattgacggaaaaggaccgtgaaaagctgattgaactgaaggcgtcgcttacaaaagaggtggacgcggtatccatgtattatcacgtcggctttgatgcacggggagaggtcagcttcagataccgccgcaaccgactcgtcaagcgtgaaaaagggttccgctggatcggagccgtgcatgagtatcttgaagtatacggaaacatcatagaaaccgatattgccgtcacacaccggaaatccgagaaaaagcactcgcctccctcagaccgcaacttgaagatttatgagaaaatggcggaaaacagtgaaacgatgacaccgcgcgatttgttttacttcgcgaatgaattaaaggatcacggccagtatcagcgcgccatcacgtattatcaccattttctttccacaaaacagtgctggatcgaagacgagatcagaacgtgccaatatctatccgattgctacagggcggtcggccatgaagaggccgccatgacgtctctcttaaaatcatttctgatcgattgtccgcggccggagttctgctgcaggctcggcgactattttgcggagaaacggcaataccggcagggtgtgttttggtatgagctcgccctatccgccaaaagcagtgatgcaggctttacccagctcgaatattccacctggtatccccatctgcagctctgcgtctgccactggcagctcggcgacagagaaaaagcgaagattcataacgacaaagccgcctcctatcatccgtcacatccgagtgtcctgtataatcaaaacgtgctcggcacataacatcgaaaaaaagagctgccccgtatgaagggcagctccttattgattacgctgtcggaattcctccgcttacactgtaaatctgggatgtcacatagctcgattcttctgaggccaaaaagacataaatccctgctagctccgccggctgtccggcgcgctttaatggaacggccggtgtttccttgccgaatttcggaatgttttcaccgggctgtcctcccgaaatctgcagaggcgtccagatcggccccggcgctaccgagttgactctgattcctttattcgccagctgttttcctaagccgacggtaaaaccgataatggcatgtttcgtcgcggcataatccaacagcatcgggcttggattataaccttctacggacgttgtcgtgataatagacgcgccttccggcagatacggaagcgcggctttgacgagccaatacagcgagaatacgttgacttcaaatgtttgatagatttgttctgtagtaagatcgctgatatcatccactgcctgctgtttgccggcgacaagagcgagcgtgtcaagaccgccaagctcttgatacgctttttccgccaattctccgcaaaacgcttcatcgcttaaatctcccggcagcagaacggcttttcttccctctttttcaattaacgctttcacttcttcagcatccggctgttcctcaggcagatagttaatcgccacatccgccccttccctggcataagcaatcgcggcggcccggccgatacctgaatcgccgccggtgacgagggcttttcttcccttcagcttgccggctcctttatagcttgtttcaccgcaatccggcacaggcttcatctctttttgcaaaccgggcggttcttgatattgttttggaaattcatcatgatcatatttcgtcagcgggttgtgcagatttgcatcagacatacaagactctcctttatcattggtgatgtattcgtatgtgtacccctttagcatgacggatcaaacgtgtaagtgcagtttccgattgataaagggaaaacaaaaaaggagcccgtaagctccctttttttatgactctccgagtacgttttcagccattttcgctaaatgctgggcgcttcccgaaatttcctgcatcgtggcagaaatttgttcaaccgccgccgcttggccgtttgtattctggttgatggattcaattgagtcctccagccctttcagcaggctgtggatttttttcgtaatctggtcaatttggccgacgttgtcttttgaatgagtggcaagcttgcggatttcgtccgccaccacggaaaagcccttgccggattctcctgctctcgcggcttcaatggccgcattcaaaccgagcagattgctttgatccgagatgcccttgacagtgacggaaatgtcggcgatttctcccgcgctttcactgacttgtttcgcctgagtggaaatcccggtcatctgtgctgagaaaccgctgatggattctgagatatccgcgattgccgaagcggtctgttccacgacggcggacaggctttcagcgacatcatgaagcttggctgatttttcaaggctcgtgccgagaccgacgccgccgatgacttttccgttttcatcatgaagcggaatcgctctggcgatcagcggaaatccgaagagctctttcggcaccatgcttgtcttcttctgattcatgcggatcgcgtctgtaatgatgtcccctttttgcagcgggtctcccggctttacgttaagagaaaacgttttagccggaatattcacgattaatttttctgtatcataaattccgatggtgatgtcatcttggatcaggctgtttaaaaaaggcgcaactttgacaaatgcgtcaagcaggctgtgcgtttgctgctccgtctgtatactcatttctttcactccttcttaatatgggaattgccgtttttcatgctgaaccgaaatccatttcagcgtggtgaattcttcaaggctccattcgccgttcagcctgccgagacctgattgcttctcaccgccgaacgcgacgttcggttcatcattaatggtcgtatcgttgacgtgaatcatgccggtttcgatccgcttagcaaactcaacgccgcgctcaacgtttgccgtatgcacggctccgcttaaaccgaacggtgtcgcgtttgcgatgcttaccgcttcatcctccgtttcaaacggcatgatgcagacggccggtccgaacagctcctccttcgcaatgctcatctcaggtttcacatcttttaaaatgacgggctcagcgaccgttccgctgaatcggccggccagcaccggaaccgctccctcttctatcgctttttcgacagaccgtctcagaccttccgcctgtctctcattgattaaagggccgataaccgtatcagggtccatcggatcgccgactttcagcgatgacactttcgcttcgtaaagctctgtaaatttgtcatatacagatgtgtgaacgagcacgcggttcgccgacatgcagatctggccttgatgcgtaaaccggctgaatacggccgcattgacggcgtattcaagatcagcatcctcaagcacgatcagcgcgctgtttccgccaagctccaacagcggttttttaaagtgtttgaccgcaagctgtccgatatagctgcccactccggttgagcctgtaaatgagattatccgcgggacgggatgctcaacaaagctgtcgccgatctccccgatatccgtcacgataacattcagcagcccgtccggtacgccggccgcttcaaaaattttcgcgataagcgttccgccgcagatcggtgtttcttcatgaggcttcagcacgacgccgttccccgcgccgagtgccggcgcaacagatttcatcgaaaggaaaaacgggaaattaaacgggctgatcacccccacgactccggcgggtattctgtacagtctgttttcttttccgtcaatcgtggacgggagaattttcccttccatccgcaccggaaatgttgcggcttcttttatcatatttttgacaagtccgatttcaaactcagccttcagccgtgttccgccaagctcctccatgattaagtaaataatcgcttcttcgtgctcttcaatgaaagaaacggctttttccaaaatggcccgctttttaaaagggtttactttgtcccattcttgtttcgcaagagccgcggcgcgatatgccgcatccacgtcatcagacgtcgctttttggaatgaggtgatgactttttgagtataaggatttctgttttccaatacgttccggctgctcccatccctccatcggccgccgataaactgcttatttagttcttcatattgaaacatgtaaaacatctccctttcaccgaaacttgaaattagttgatgagtcatcttttgtatcggtcttaaggtgagaaaattgaactatttcacaataaaattcccgtccttccgtgcatcgacgctttttagctttgtccttttaaagtggaaaattctttaattgactgcgagaaatttcgacaatataatacaaacgtcagtgtatataatgataagaatattatgaattttcaggaggactcatatgtctttactatttcggaaaaagccgctggccgacttaaaggctcagagcaaacagaccagtctgtcccgctcgttaagcgcttttgacttggttttgctcggaatcggctgtgttgtcggcacggggatttttgtgattaccgggactgtggccgcgacaggcgcaggaccggctttgattctgtcgtttgtgctcgcgggccttgcctgcgcgctcgccgcgttttgttatgcggaattttcttcatccattccgatttcaggcagcgtatatacgtattcatatgtcactctcggggagtgtctcgcgtttttaatcggatgggacttaatgcttgaatatgtcatcgcgctcgccgccgtcgcaaccggctggtcatcctatttccagtcgcttcttgcgggcttcgggctgcatcttccggaggcgctgaccgccgcacccggcagcaaaacgggtgccgtgttcaacctgccggccgttatcattattttggtcattaccgcgattgtttcaaggggcgtgaaagaaagcacccgctttaacaatgtcattgtattgatgaaaattgcgatcattctgctgtttatcatcgtcggtttcggctacgtgaaaccggaaaactggtcgccgtttatgccgttcggaatgaaaggcgtcatcacgagcgccgcgaccgttttcttcgcgtatctcggatttgatgccgtgtcaaacgcgtcggaagaagtgaaaaacccgcagaaatcaatgccggtcggaatcatcggcgcgctcgccatctgcaccgtcctttacattacggtatcgctcgtcctgacgggaatgctttcgtacaccaagctgaatgtcggggatccggtatctttcgcgctccaatttgtcggccagaacaagatagcaggcattatttccgtcggcgcgattatcgggattacaacggtcatgctcgctctgctttacgctcaggtgcgccttacatttgcgatgagcagagacggccttttgccccgcatgttttccaaggttcacccgcgttttaaaacaccgtttcaaaacacatgggtgacggggatcgctgccgccgggatcgcgggttttattgatttgggaaccttggcgcatctcgtcaacatgggaaccttggcggcctttacggtcattgcgatcgccgtcatcgttttaagaaagaaacatccggagatcaaatcttccttccgtgttcctttcgtgccttttgtgccgatcatcagcgcatgcttatgcctgtatctcgcaagcagcctgccgggcgtgacatggctcgcctttgtcatctggatcgccgccgggatcgtcgtttatatgatgtattcgagaaaacacagtttgttaaataaataaaaaaggaaggctcttttttctgtttgagaaagaagagccttttttgcacttgataattcattcaccttatgaataatatggtgtatgcttcgtttacataaaaaggaggagaatcactttggcaattgccgccccgcttaaagaaaaacctgtccatcgtcccgagacaaccatgtattctattttgttcattatcgggatctgtcatctgctgaacgattcactgcaagcggtgattccggcgatgtttccgattttggaacgttccatgaatcttacatttacgcagctcggaattatcgcctttacgctgaatatggtgtcttccgtgatgcagcccgtcatcggctggtatacggataaacgcccgatgccgtatgccttgccgctcggactcaccgcaagcatgctcggcattttaggtctcgcgttcgccccgtcttttctgacgattttatgctgtgtcttttttatcggccttggctccgccgtctttcatcctgaaggatcgcgtgtcgcctacatggccgccggcgaaaagcgcggcttggcgcaatcgatttaccaagtcggagggaataccggccaggcgatggcgcccttgattaccgcgctgattctcgttccgctcggtcaattcggctctgtctggtttacgctagtcgccgcaatcgctgtactgtttctcatttatatcgccaaatggtataaaggccgccttattcatttgcgcgccgtaagtaaaaaatcaccggcctccgccgtgcagaccgtgattacaaaaccgattattctcgcccttatcatgattatcttcttaattttcgcgcgctcctggtatgtgagcgcgatcggcaacttttatacgttctatgcgatgaatgcctatcatgtcagcattcagcaggcacagagctatatcttcgtctttttatttttcggagctgtcggaacgtttctcggcgggccgcttgcagatcgtttcggaaagcggaacgtcatcatcgtttcgatgatagcatcggctcccttgacgattttccttccgtttgcggggcctgtcatcgcctatggcgtactggcgctgatcggtgttgttctgatgtccagcttctccgtgactgttgtctacgcgcaggagcttgttccaggcaaaatcggaacgatgtcagggcttacggtcgggctcgccttcggaatgggcgcgatcggagccgttgcgctcggagctcttattgattcagcgggattgacgccgaccatgacagccgtcgcctttctgcccgttttaggtctgctcgcctttgtcctgccgagcgacaaaacattaaaagaatggcattcataaaaacaatccctgccgaaaaggcagggattttatgtttcaactgtataaaaatgagtatcaggaaccgcgtatttcggaataaacccgtctctgaaatcaggaaacgctttttgaatttcatcaatccatttttttacgtttttgatgtacggtacgtaaatcatattgactgtcgcctcgtcatcaatgtgatagtaccagcacagattgaattcgttctccgtgacgagcgtaaagcctgaaaaatgataaaatatcagcggggtgtcattgacatacacagccccgtcacgcaggctgacgtcatattgctcaatattccaaagcgccgcattcgcgccgatcgactccgtgacatgaacgtgttcaaactgcgcgggccacttttcaacatacctttggtcaccgtatgtctttttttcttcattcatctccaccgtacaataggagatgcaatcctgtctccactgccagaccgcccgatacgcttccccggtattccgcgcgccgacaaacccggtgttgtactgccccgtcagcttgtaataagacgcaaaccgttctgaattgcggtgatccgtcagaaaaagggaagcatccggcttttccgcaaacagctcgcccgcatctgagaagaaaaagagatcggtgtccaagtgggcaaaatattcagcttcatcatactctgtcatcacatggaacagaaatgccggcttcagcgtccagcaatattcatgaaacgtccggccgccctttgcttcaagcagctccgggtcctccatttcatggagctgaaccgccgtgacatgttcccacggcacctgctgaagcaattcatacgctttctgatcgacacacagcacatacagatgaaaatcccggcaatgctcatggagagaatgaatcatcggcatcagtttaaagatatgcgttctggaaacaatggttgaaaaatgatatttactcaccatatcacatccaatttatttaagatccacatgcagtaaatcagcagccagcgctttgaacgcccttgcaaagtgcgtgacgcccagctttttttccgcttttgccaaaagctttccgacctccggcagattgaagctgttcgccgtgatccgcgggcttttcgtcttccagtccgggtcgaggttgcggtctttaaccgcgtgcagcagttcgagaaaaatgtgcagcaggctttcatatttctcataatcaagcagcacttcgatgtctgccatcatgctgttggttaactccgcgtcaaacgggccgttaaacgcgaggtgcacgtcaagcgaatgaatgtcattgtacttgtcgcacatgtacgcgatgttcgccctgatgtcatcaacggaagcgcagttgctcggatgctcctgatggacgctcatgatatcgcgccgcagctgaaatctcattcccgactgatgaagcctgatgccgagatcataatcttcaaagccgtatctgacaatgccttcatcaaacaggccgagatctgccacgtgctgtctcttaactgacgaattgttcgtaatgaaaaaacgccacggcagacggtagccgttcaaatcatctccgtatttttccaaaatgcttttcagcacacggataaagtcggtatctaaatcaaagcattggtcgagaaaacttccgtctctgatgtcaccttcttcaaggagcggctctttatcgcccggcagctcttcatacagttcggcgagtttttccttatgctctttttcaaaacggtcataataaaagctgtaaatccgcttccagaacataccgcatacgacaagatcgtcccggttctcatgagccttgatatgcttcgccaccaaatccttttcggcaagcatgtcgctgtcatggaagatcaaaatatcgcctctggcattgcggaccgcctgattccggccgtaagcgatccctctgttttctttaattctcacaaaaatcagcgggaaattcgcgctgaatgattcaagcatggataaggttccgtcttccgaaccgttgtcagccacaatcacttcgaacggctctgtgcattcctgttcattcagggacagcaggctgttataaagcctctccttggaattatatgcgggaacaatgacgcttgccttcacttttcgttcacttcctgtatatgatcatttatttgttatcatcctcagatgcaaagccgctgaactccgggcagacggcgctgaccgtcccgatcacccgcttcagaatgtcctgataaagctgatggacaaacggcaggtcggtccggtccgtctcatgaatctgccgaatgtcgccggctgtaacgatccggtatccgctgaaatgatagaaaatcagcggacttccgtcttcgagcacaagacgcccgtccttccatgaaaacgtgtggcggccgtaattccaatggccgatattcacgccgggcgtggtgatgtcacacacattcgggaacaggccggacatgtaatccaagtagccttgatctccgaattttccttcgcccggcgcatttttgcattcttccaggcagcgttctttccaccatctgagacaatctgtaccggcactgtcggttttgaagctgagaaaaccggaattataccggcctaaaagacgctgcagcatgtcgatttcctgttttccaaatgagggaatgacgatatcgccccgtgacagaagcaccgaacaatccggctgattgtcaaaaatcgcgcgcggatcggcgaagaaaaacaaatcggcatcaatgtacgtgacacgctctaattccggatgtccgtccagcacgaattcgagaaataccggctttaccgtccagcagtattcgctctgatccctcgtccgcttcagttcaaggagctcctcattttccagtgcggacacctgaatcaaggtgacattatcctgccgcattgcctgaagcacgtcataggtgtcttggtccatacacaaagtaaaaatgggggcgtccgcctgaaccgctttcaatgagccgaacaaagcgatagcctgatacagccttccttttgataaaactgtgcaatatgcgcttgtcacgtctttctctcacctctgtttctgttacttttgaaaaaaggctttataccattcgatcgttttttccaatccttcatcaatggtatgcgcgggcgtccaattcagaagcttcctcgccttttccgccgataaatattggtgcttgatttcatggcttccctggttgagcactttcggcttgaggtcactgtccatggccttaagaattttttctacaagctccagcaccgtcagctgaatctcattgctgaagttgaacgcttctcccgcaagattgagctcctccatcttttccgccagcaaaaggtatgcctcgaccgcatcctcgatgtaaaaataatcacggataaatgtgccgtcgctgcggatttccggcgcttcaccgttcagcacgagctgaatcgtctgcggaataatccggttaaagttcaaatctccgccgccgtacaagttgccgcagcgcgtaatacagaccggaagtccgtacgtattaaaatatgtgtggcttaacaaatcggcacagctttttgatacgtcatacggatgtttgccctgaagaggcatgttttcatcgtacggcagtgtcggctggtcgccgtacgctttatcactggacgcgacgatcacccgcttgatgagaggatgcctgcggcacgcttcaaggatgttccatgtgccgagaatattggcttcaaatgtggaaatcggattgcggtttgcgacgccgacgatcgcctgagcggctaaatgaaagaccgtgtcaatttcatattcgcccagcgcccgctcaatcacatccagatcttcaagcgcaccctgcacgatattcatttgtttcacttgttctccctgatacaggttcgacttaggcacagtgtcacggacaagccccgtcacattggccccctgatcgatcagttccttcaccaagcagcttcctaaaagacctgtacatcccgtcacaaacacatttttatttttccagaaactcaaacttgatcaccataccttccatacatgttgtccccggtcccacatcttgttgatttccagcaggtttttatacgtatcgatcgccgtccagaaaccgtaatgccggtataccgccaattcgccgtccttcgccagctccttcagcggttcttcttcaaacatgacatccctgtctttcggcagataatcaaataccttcgggctgagcacgaaaaatccgccgttgatgatgccgtcactcgaggttttttcagaaaagcttttcgccatgccgtcttcaaccgtcagcgttccgaattgcgaggacttttctataccggtgacggtcaccgctgccccttttgattgatgatagctgatcagatgaaacaggttgatgttggccagtccgtccccgtacgtcataagaaaggtttcatcaccgatgatgtcctttgcctgtaaaagccgccccgctgtctgcgtgtgttcccccgtgtctaaaaaagtgattttccacggctcggattttcccaatatccgtacttctccggtagagctgtccagcgtcatgctgtgattcttccagtcataatctaagaaatattccttaatcatctctcctttgaaaccaagaagcaggataaattcgttcacgccatagtattgatagagtttcataatatgccatagaatcggtttgccgcctatcatggcgagcggtttgggacgttcattggtgatttcgctcattctcgttccttttccgccgcagagaatgactgctttcatctctacccctcttctctgtgaatattggattcgaaaccgcccgtataagagaaaccaacccgataatttgtccgattctctatcaccggtttcaaaatctactgtaagatatgagagattggcgccctttgtgaccaaaagctctctcttttttcagattggtgaagatacacaaaaaaaagagcctcacggaaattccgtaaggctctttttattatttattatcctgattcagcttttctttgccgtaatgatatttagacggatcaaccggcgtaaagtcgctcaatttgtggaatctgagcaagtctttgtacatcacgctgtcagacagcttcagctgctctgtgactctggctttcaggtttttcgtttcctgattgcctttcagttcttttcctgtcttcgtatcgtatacgacattggagatggaagtatatttcggcgtgacgtaatctccgttacggaacgtcaccgtatcatcatggtctttcgagaagagatcggtgccgaaattaatatatttcttagaatcgatgccttccaagtgaaggatcgtcggcacaacgtccatttcaccgccgtacgtatggttcaccccgccttttttgccagggatgcgaagcataagcggcacacgctgattctgcgcgttttgataaggcgtaatttctttgccgagaatttctttcatcgcgcggttatggttttcagagattccgtagtggtctccgtaaagcataatcaccgagttgtcatataaaccggatgacttcagatctttaaagaactgttcaagcgcctcgtcgagataacgcgccgtctggaaatagtcatccacagtcgcgtcgcccgtcttcgctttttcgatcgttgcgtctttttcatcaagcgtaaacggataatggttcgtcagcgtgagcaaatgcgcgtagaacggctgtttcagcgattgaagcttcggaatggattctttgaagaatggtttatccttcagtcccatattgacaaggttgtcatcagacatatcgtatgtgctggcgtcaaagaatttatcgtagccgatatgtttgtaaatctggtcacggttccagaatgatttgtagtcaccgtgtaaaacggcgcttgtatagccctcactttggtcaaggatggcaggaagcgattgatacgtgttttccccttttgtcacgaaggctgacccttcaggcagtccgaacaggctgttatccatcatcagctcggcgtcagatgttttaccttggcccgtttggtggaaaaagttatcaaagtacgtcatgtcctctccgccgcgggcgagtttattcaggaacggcgtgacttcttttccgtcaagtttgtagttgatcaaaaacgattggaagctctccaggtgaatcttaatgatgtttttgcctttggccttgccgaaatactcggcgttcggcttcgcataatgcgacgatgtgtagttttcaacgctcgtcaggtcatcgctgctggcatatgcccgctgggattccgtctgcgccgtctgtacgccgtcataaatcgtgtaattataaaggcctaagtattttacaatgtaattgcggtcaaacgttcttgtcagcagctccgggcggtcctcttcggcaatcgccaggttcacgaagaacaaaacaatacccgtcacgataattaatgacgtataccgttttttcagcttgaattccttcagctcacgtctccacaccagaagcgcgattaaaataataatatcaacaaagtataaaatatcatggccggacataatgctgaagatgccgtctcccatatttcccacattaccggattgctttaagttcgggaatgtcaagaaatcatcgaagaatcgatagaataggatatttgcatacaaaataaacgtcatgatgaaatcaataatcaccatgataatcgctgatttgcggcctttcgcaaacaatgccagtcctaaaaagaaaatggcgcttgagaacggattgatcacaagcagaaactgctgcgtcggacccttcaccccaaggttaaattcagcatgataggctaaatacgttttggcccaaaacaaaataatagccagtacaaaaaaactaagtctgtaagaaaataatttcttcatggcaacctctactttcctaaacactttaaatctgtattcttactttttgcttcaattcctgctttccgagcaaaacgaaagcatcacacagccccataaacacaccatttataaaaacgatatatttatcattcgtgtcatgcccattgaacatcttatcccgccagccattagacgcaggatatccgttcttcgtttcacatttttttctggcattaaaaggtaccgtatcagacccggtctaaaaataggagataccaaatataagaataacacaaacttctaaaaacgaaaaatgaatatcaaagacagccgcccaacaggcgggctgaagttattgtatgcaaaggggttgaaaaacttgaaggtttttttggctgatgtaaaaaaaggactggagtcatccagtcctttacctgtcaaatccccgcccaaacatcttttgcgtaaatgccttttgtctggaggttcaaaagccattcttgcgcttgccgttcgtctgtttcgtggaccgactgatacgctttttgcagcgttgcctctacatcgggcgccattttgctgccgtcgccgcatacgtagaggtgccctccccggccgaggatggaaattaaagcgccggcgtctttcgccattaagtgctgcacatacgttttcggtacgccttctttgcgggagaaagccgtatgaagcgtcacgattccgtctttttcataagcttcaagctcgtcacggtaaataaaatcatgatcgtttctgcatccgaaatacagatgagcctcccccagctcttttccttctttttttaacgccgcccgggcttgcagaaatccgcggaacggggcgactcctgtgccgggaccgaccataataatcggtttttccggatcttccggcagccggaatcgtgtttccggagtgcggacaaacattacgataccatcctcagggccgcggtccgctaaataattcgaagcgacaccgcgatactcccccaaaccgctccgggcggggccgcgaacgacgccgacggtaattgaagcctgcccgggatgtttccggggcgaacttgaaatcgaataataccgcggcttcaacgggcgcaaaagctccagaaatcgctcaaacggaagttcacacgcttcatatttttcaaggagatcgagcatcgagacgcgcgatgttaagatttgctcctgatagacgccctcctccagaaaatcttccaaatcccgtttgtgcggcgggcagaccgtataagcggccatttcccggatttgagcccttgatgccgcttcctgcaattcgacacagctgctcagaagatcatgcagcctgaccggccgatcgagcgggagatgaaccgcgctctgtccgctggccgtcagcagcacttgatcattcccgttcagattgaaccggcggagaacacggctgacctgctctttgctgtttaccggcagcacgccgagatgatccccttcatgataggcagcctctttcggcagagtgatttcgatatgccttgtgctccggccgctttccggcgcctgaagttccctgttttccgcaacggatgcgtaaaccgcttcatacgtctgtgccaaaggagacccgccaagcccgctgacaaattgaaggcccagcgcacttcgctctttttcggcattttcattcagcttgagaccgaatgccttcatggcgtccgtccacatgctttttttccattcatcaagctttccttcaaaatcgccgctgacgtccccctcgcctcgggaggaaaagcgttccgcccctttttcggcaagcttctcatcaatcagtctcggcacagcctgatatgtcgccgcccagttatgatcaccgcagccgaagacggcataccggacgccttccagctccccgggtttgacttcttcaagccattgaacgaattgtcccgcgttgctcggaggctttccgttataagaggacgtaatgatcaagagagctccttctttcggcagttttccgatccggtcatttaaaggcgccgtttcagtccggacaccgtgcatcccggcagtatcggcaagctcccgcgccacgccttctgcggttcccgtatctgagccgtacagaatcagaagcgttcggttatcaagcccgataatggatgcgccttttgtttcccgtttttctttttcgacgtcttcccccgctttttcagccgccgggagagcagccgcaacggcttctttatttctcggccgcacccggatatgaaagtcgccgggcttgatcgtcagtgtctgtttaatatcgagctcataatcggtgtgatcgataaaggtaaaatgctgcagaatcatccccagaacaagagttgcttcatgcagggcgaactgcataccgatacacgccctctgaccgtttccgaacggcttatacgcatggtgaggcacttgatcaggatgttcaaaccgctccggataaaattcctccgcattgtctccccacgcttctttatcacggtgaagctggggaattaagacggaaattctgtctttcggcgtgatcggatatttcccgccgatcaccgtatcctctttcgcataaaggctgaacgcaggcgcggtcggccataagcgcaatgactcctgcaaaatcattcggatataagtaagatccagcacttgtttatatgaaggaacaggatcggtcaatacccgatcggcttcttcataggctttttccaaaacacggggatgtttcagcagaaaatagatggcaaaggaaagcaggccgcttgtcgtttcatggccggcaattaaaaacgtgatgatttggtaccggatattttcatcatcaagtttttcgcccgtttccgggtcttccacattcagcattctggccagcagatccttttcatcccggccgcctgaccggcgctctgcgataatactgtctactaacgaaaacatcgcctgaatgtcatgatgaaattggcgcttcgtcctgatcataagcttatcctgaacatcaaggcgctgcatttggtgcatcgcttcatcaagggcgcgcaccatgctgttgataaacggatgaggcgtttccctgtaatagctgttaaatcgatagttaaagccgcaaagcccgatcgtatcaagcgtcaggcgggtcatatcagcaggcacatcaacggcctcatccgggttcagcctagcccatttttgaatcagctgcaccgcgatatcagtcatcatcgaatgataatctttcatcgcgcgctggctgaaagtcggcatcagaatattatgcgcctttcgccagttaggctcatgcgtccagcttgtaaacagcccgtcaccggaaaacgcccggactttctccaaagctccttcaatgcttttatcgaaccgttcttcatcacaaacctctttcaccagttcatggccggacacgacgataatggcgcccgccggggtatgcagctgaaaaataggcccctgctcgtttgccagtttgattagcgacattgtaggcttgtctttatcaagcaaaggaagattgccgagcgggccgaatgtctttggctgcggaatcggacctgtttccttcatgaataacaccctttctaacacattgatgcgttccttccaactacattgcccttttcaccggccgattatccgccgtcacggatcaatcatcggattgacgatcgataacggttttttctatactggagaggcttgttaaatacagaaataaggtgagttcacatatggattttgaaatcaagtttttatcgttttatgtcattcaagtggaaggaaaagatgaacaggcaaacaaacagttcaaacatttccagacgcttgacacggaagaatttgaagaaagcgagctgaaggattttcttgacggggaattgaagaaaatcgtcaaacggaaagccgaacggcatccgcaatccgagcaggtcccaacaaaaatcggccattttatcacggagccgggccatgagcttgattcaaatccgaattacaaccttttcaaccgcgccagacttgcggatacgaaggaagcatttatcgaagcaagcgagcagttcgtccgcacttaccttgacacgagcgccgtgcgcggcggtgtttttatcgtggcatcggccgttccgcgcaagtattttgaagacaaattcgtctttatgatgaaatgcgatttcgagccgaaggtcgcccgcatctcagacgcctcgtctctcattaaaaaggtcgaaatggccatcacgacaaaaaacatgaaaagcattcaatatccgtatatgccggaagaaggcatgacggaagagcatgagctgaaaatccaccaggcctcgcacgcccgttatttcgaagattttctcaaatttgtcgaatatggcgaatcgatgccggaaatcatgaaaagccaagtcatgaacatggtgcaggaacacgtgtatgaaacttttgaagaaaacagcgaagagcttcagcagtttgagcacgacattgaaatttgggaagcaagtgaaaagcgggaaattcaggagcgcctcgacacccatcaagtcatcgaggcatccgcgcagatcattgaacacacgccggaagccgagctgaaaatgaaagtaggagaaacagagattaaaggattactggctgatttcggcgaatccatccatctcgcaaaagtgaacgggcgctatgtcgcgctcattgaggcggagacgatctcgtttgaaaaaggcagttcgccggtggagtttcacaagcctgaggggctgcatgaggtgattgaacggatacggaataaatctgaacaagactgacaaaagtccagacgccatgttctggactttctttatttaataaggctctttgagcaatcgatagcattcactgatgatgtcttggacgccgggcgttccttttatctcgcggcggacgatttcagatgagagattctgcacctgtaatgcccgctccgcccgtctttcgaagtatgcttgacatgcagtttcatggttttcgtgttttcgcagttcttcactaagcacaaccgcgtcttcaattgccatcgccgctccctgcgccaatgtcggcgctcctgcatggacggcatccccgcccagaacgacgcggcctctgtgccacggttctttgaccgccatctgctcaatcttatgaaacaaaacgggatattcctttgacatattctctgtcacaaactttactcccggaattccgcgcagcaagtctttcacccgttcaaaacgcgtgtcctcgtcatccctgaagtcagcgtcatacggccggatgataaatacgtatcctgttttttcagagagcggcacgactccgacctgcgtctgcccttttttatacatcagtgtcgaatcatgaaatatcggctcgggaaaagaaatgtaaaatctgtgcgctcccatgccgagatactctgttttcacttctctttgcagcatgtgatcgcggacagcggagcggatgccgtcaaagccggcgagaatgtcagccgtcatcatggttccgtctgcacaatgcaccgttatttcatctgccgtttcttcgtaagacacgacttttttaccgggcagaatcgtgacccccgccgcttcagcatgctttttgaggatatcgtttaacgtttgacgcaatatattattccgccccggcaatgaatcatctaaaaacgcctcactcactttaaactgcagcgttccgttttcatcatgctgcttcagccattccgtttgaaagccgtgttggcagcattcatcatacacaccgatttcccgcagcacccgcagcgcattttgaggctggagaatgcccgctccgctttttcgcatgccggacgccgcctcgcaaagagtcacttcaaaacccgctctgccgagagaaatcgctgcggacaggccgccgatccctccgcccgctatgatgatctttttcacttcatggttcatcacgataccgccttctctatttatttattattcattaactattagccaccttactatatagactgaaaaactgtcaatctttataggttgccttttgaatccggcaagcttatactttgaatcactaaaatggtacggaggcttacaaaaatggagttgagacatttgccggattactcgcagattgccggacgcgctgagatttacgccgatatggatgctgaatcattgaaaacatttttgacgttatttgatatgtctaaaaaaatgaatcaggtcatggagcattatttctcaagtcacggattgtccgaagggaaattcaaaattttgatgtttctgtttgacgcacccggccacagcctgagtccgacagagctagcaaaaaaatccaatgtcaccaaagcgaccatcaccggattgatcgacggactcgcacgggacggctttgtaaaccgcagccggcataccggcgacagacgaaaaatcagcatcgaactcacaaaagaaggaaaagaaaagctgatgctgtttcttcccggccacttctccaatatttcaggagtcatggaaagcttcaccgctgaacaaaaagcggaattgacaaaaatgcttgaagtattatttgataagcttctgctgttttccggcggcagaacataaagtagtatcgtaaaaacaaaggcaaatttctatgagatggaaattgaagtaaaaagatgagggttataaaaaaacagcctgcacatttgtttgttcaggctgtttcagaagaaataattttaaaattactttctcttcactataaatgcaggtgttttaatgctggaagttacatttgtatatcgatttttagtcttcaacctcactctcacactatttgatcctttttttaacgatttttgatttgagagtttaaatacttttttaggtgttgagtgactgaaagaacctttctttgtttcattagccacccattttgaaccgttccaaacatcaattgtcatggaataatcaaatgttgcgattgtcccgcccccatatgatgctacacaatcaatggaagtagcttttgcagaataagaatccgcatcggtacaaactctcaatacatatgttgcataatctgtactacaaggcataatatccttcccctttcaaattttttgaaacaggcttgttattatgacaaaccctccgttcacttctagctggcaaacgtatgacaaaggggatctcatggcttaggagagtaaaaattcaaaactcttagaaattaacaaaaggcgcccctctcagcagggcgcctttttcgcgcggttaatcatcactgtttaaaattccgaaaaaccgtagcaggttgataaacaagttaataaagtcgatataaagcgtcaatgccatcaaaggaatcaggtcagccgtgatgtcccggtgcttgatctggttcagatcgtataagatgtacattgaaaacacaatcgtcccgatgacggaatacgccatcatggcggcggaattcagcgggctgaaaatattaaagatccccactgcgagaagtgcgataacagcgacaagcaagaaggaccataaaaatgacaagtcctttttcgtcttagcgccgatcgtgccgagcaccgcaaaaatcacaaacgatgaaccgaatgcctccaatacgacataggcccccgctgcggacgcataatggctgataatcggaaacagcgtcattccggaaatgaaagcgaatgaaaacacaaacacatatccgacggctttttttcggcgcagccaaaatgcggcgatgatcatgacgacctctaagaccgacagcggcagcatcaatgccggcggaatgaactggcccgtatacaggccgattgtcgcaactaacagtgtaaacacaaataccgttataatgcgctgcataatagattgtttgctctcataagcagcagtttgcatgtcaaaagtcctcccaaaaaaatgatcttgataggtctattataaataaaatgggagaaatttgtatgattttaagaagattttaaggatgtcaggcctgacgttttgctgcgcattcctgcatatccatgaaatcatgcagttttttcgtcaagccgccgtgcccgaatcggatcttccccttctgccccggcgttttcgcgaaatcgagaaatgccagcacataaagacgcctgacgggaatcggaatgacgcccgcatcataaaaccagccgtcaattgtattgagcacgcctttgttaatgccgtattgcttcgtgcaccaatgcagaaagcgcacttcgggcaggtgcagataccggctctcccggaaaggaacagttgaatgcttcatatgtaccgcctcctgtcattggctgttttttaagattgttttacttctttgctcttcagggaaaatcgatatttctccaccttatcaatttgtgtcacttgggaattatgaaccgtaatctgaactgtcccgaaatcgagcgtttccagcgcgctgataatcttttcaatcacatgcggatctacgtttcctttggacgtcatcatgctccccctttatgtctggccgttcgtcttttgacaatgagtgttttaattcatactattctgataagaaatatataattatactattatgttttcattcagaaatcaataacatttacacaatttttggatatgttttctttgcgaaaactgtcacttccttcgctttgatttaaaccgtttcatcccgaaatcgactcccaaggcgtcatatagctgtttttaagaacgcaatcttcacgttccgacatatttacattgttttccgctgacaaaaaaagcgccccgcctctggccggagcacctttttcctatgcttttgcttcctcgatcacacatgtgacacccatgctggcgagcgcctgctccagggagccgtaagtttgatactctgaaaaatcaagccccaattggatagaagtctgtgccacatcaggccgaatgccggaaaacacggttctgatgccgagtagaaataacgttttcgacagcatatacaattgttgcgccaccatcgtatcgacaatgggcacaccggacagatcaatcacaaggtttgtgatccgtttggcgacacagttttccggcaccgactccaaaatcacgcgcgcccgtctcgtatcaatcgcgccgatgagcggcagagtgccgatcgtatctgcgattaaaataacgggacagctcaattcggaaataagctcctgctgagatgacagcctcgcgatcattaatttctgaaactgttcagtaaaatccgtcatcagctgatcaaacgagccgttgacaaggtgattccagcggcgggcatcctcgtttgttacgatgtcctgatgctcatccataaaacgggtgaccgcctcccaaaagacggttcttgaattgccgatcgcctcaacgacctcatgaacctccgcgtcttgctccactctgcttttcgctacctgtgcggcccatttttctttgttatgctgaaaaacggcaggatcctccaaaaaagcacttgcgatgaccgtgtttgtaaaggtatgctgctcgatcagcagccgtttcatttcctcacttaattgatccgcagaataaaaacgccctctcagcttccgtctcagcttgagccatttttccgtcagctctgccgaatgtgtaataatataatcatgaagtaattggtctttgttcactgccgtctcctctttcaagaatatgtacttttgtttaaattataaatcggaatcaccgatcgcactagagaaattaaaaaaaccggcacattaaagcttttgattgcttttttcgacaggaggatacactataaaagaaatgaaacaggaggtcagtatgatgatcaataaaatcgcgacagtcgccgtatacactgatgatcagcaaaaagcgaaaacattctggacggaaaaagcggggtttgaaaccgtcgccgagcatccgatgggcccgggcgccttctggcttgaggtagcgcccaaaggggccgccactcatttggtgatttatccgaaagcaatgatgaaaggggccgagtatatgaaggcttctatcgtatttgagtgtgaagatgtctttgccgcatacgaacagatgaaaaagaacggtatcacctttttagatgaaccgaaacaaatggaatggggcagcttcgtgcaatttaaagatgaggatggtcatgtctttctcctgaaatcgtaatccgtcaggcatcttaattgactttgagaatcattttcatttaaaatgttggataaagcgtgaaaaggattggagagttgccagatgttcgtgcaaatcagaaaaatgaccgtaaaagaaggacatgccgacaaagtaatcgaacgcttcagttcaggaggcgtgattgaaaagcaggaaggtttgatagacataacggtcctggaaaaaaaagtccgccgcggtgatgaagaagtcgtcgtgttaatccgctgggagtcagaagaccattggaaacaatgggaaaaaagcgaagaccacatcgcggcccacaaagcaaaccaaggcaagccgaaacctgattatatgcttgggacggatgtcggtatgtatcatgtcagagccgttaaaacaggcgtacacgaaaaataataaagagcatttgccccagggcaatgctcttttcattttttctcctcatacggcaggacaaacagcggtttatcgggcttccattccgcatacagcacgtcctccgtttttttgatgttcagctttttcagctcctgattcagctgcttttcttccagcccggcttctttcagattttcatacagcacttcgccgtcaataatcagcgtgaccggcaaagagacctgcttcggctttatttgcatgtcgccgtttttcgtcgtgtcatattgaaatttcggcaggacgctgaccatcccgtttgtttctaaaatcgcgtactccgcttcctgtatggaaaagcaattcgcctgtctgagaaggctttgcaattgattaatgtccagcttattctttttcagcacaccatatttcagttttcctttatggatgataatactcggctcgccttccaacagctttctggagctttttactttctgcgtaatcagttcgatgagataaattaaccccccccataacagagaggcaaaaatgatttcaaaaatcctgacgcctttatcatacaccgcatttccgaccagttcgccgaggatgagcgcggaaataaaatcaaacggcgtaatttgcgagaattgagtttttccaagtaattttaaaatcacaaataaaatacccaaaccgcatactaactcccaagccactgtaagtaaatgtcccatattcgcaccttcttcttaaaagtcattaccattatggacattcgcctgttttctatacagcggccggcaacacacaaaaaaacgcagccgcggccgcgttttttcacttctgcttactgtttttgattcgatctgacgacccgtaagcacacctcagcggcataaccggcggccgctccggaacccgcaaacatcgcggcaagccccaagcccattccttcccagccgccgacaccgaaaatgctgtaaacaaccgtaccgaaagcagtcaggcccagcaccgccaaaaggcactcaggccacatctttttcggccatttcttgcggagcacagccgatacggcaaagttaagacaaaatgcggccagacagatcagataaaaaaaacccatatcttttacctccgtcatgagaagctttttatttactcacctttttttcaaacaaatgataacccggcgcgagtccttttgattcgtaccccattccgctgtaaaacgactgaagcgccttgttttcggacacgcaatcgagccggattttcgtttttcccggacaagacacacccgtttccgcccaagtcatgattgtccggccgagccccgcccctgcaaaccgcctgttaatcgccagccggtggagatatacggactcctcatgtccctcatcgccccaaagacgtctgtcccacccgcttgcttcgggaagcagcatgacgacgccggccagctcttcattctgcctgaataaaaaaacatacccttgggcgatcgcctcccgcatattgtgggtatcttccccttgcagaaggccgctccactggttcgaccctttatcgcgaagccattctgccgcttgcacgagcagatccatgacctcttttgcatcatctttccgggcggaggtgacccggaatgcccccgccttctcctccgtgatcgtaaatggtgtcataaaagcctcctgtaatcagaatattcgacaccttcattatagaccaaacgcagaaaggaaaaaaacagccgtcatgtttgagggccgtttaaaaaattttcttcttatcacgttcttcttttaaaatctcaaccgcttccctgaaacgcatagagtggacgatttcacgctcacgcagaaaacggagtgaatcattcaggtcaggatcatcggaaatatcaataatccattgatacgtcgctctcgccttttcttcagccgcaatatcttcatataaatcagcgatcggatctcccttcgcctgtatgtaagacgctgtgaacggaactccggccgcattgtgataaaacagcgcgctgtcatggttgacgtaatgatcgctgagccctgcatcacgcagctgctccggggtcgcatcttttgtcagcttataaatcatcgtcgcaatcatttctaaatgcgcaaactcctccgtgccgatatccgtcagcaggccgatcaccttgtcaggaatcgtgtagcgctggtttaagtaccggagcgctgcggccaattcgccgtccgccccgccgtattgttcaatgagaaacttagccagcatcgggttgcatgtactgactttaaccggatactgcagctttttttcatatacccacatttacagatccctccttatacttgccatggccaaggaccgcggccccagtcccattgagcgccgacctgactcacgccgaattgcagaagcggtccgtactcaggttcaaaccgctttctcagctgtcttgagtaccgggaatattcatgaaactgctgaagcgcgagacggtcatggggatgcgtatccagataaagcgtcagctccaccaagacaaagtccgccgcctgaatttgctccagcagccgataatattcatcatcaatctttttcgccatattcgattcccccccgataaggattatcatagaaatcgtaaagatccttccaaagggtcccttttctcaatgcctccatcggagaaaactgctctaagtgatacggctgaaaccgcatataaagatgcggcggcgttctgaagtattttctcccgatcggcgggcagggatcaaaccggctgtggaagggtttataggatttgaccggtgtaaacggctgattttctttcattacgatcctcctttcctcaacacatgaccttaataggtatgaatccgtatcggcatttatgccccgcaagaaatgaaaaaagccagcgcttagaaacggtcacaaaaaaacactcttgctgttccaagagtgctttttcccgaatggtcagatatattggctgtcccgatgatgatgatgatggaacggatagccgccgtagcctccgccatagccgccaaaaccgtaccccggatatcccccgaagcctccgtagccgccaaaaccgccgtaaccgccaaaaccgtatcccgggtaaccgtagcctccgccgaaaccgtatcccggatagccgccgtagccgccaaaaccgtaccccgggtagcctccgtagccgccatagcctccgccatagcctccgccgtaaatcggtcttctttcattcatgatttatcgctccttcacataggttacagtccagtttatgacatccggaaggaaacgtatgggcatccgcccagttttggcgaaataatcaataattgcttacggagaaaaatacgatacaggccgaccgcttaagcaaaataaaaaggccggaacttatgccgccccggcctttttgtctttattcgcctaaatctacattgtgataaacctgctgtacgtcttcgaggtcttccagcacatcgatcagcttttcaaattgagctttcgcatcttccggaagctcgacttcattttgcgcaagcatcgtcagctccgcaactgtgaactcttcaacgccggcatttttgaatgcctcctgcaccgcatggaattggtcaggctcggcatacacgatcacactgtcatcctcttctaaaatatcgcgcacgtccacatcagcttccatcagcaattccagcgcttcatccgccgtcttgccttcaacgccgataacggcagtcgcatcgaacatgtaagcgacagacccgctcacacccatatttccgccgtttttcccgaatgcggcgcgcacttcaggcgccgtgcggtttacattattcgttaacgcatcaacgatgatcattgaaccgttcggcccgaaaccttcgtaacgcaactcgtcaaagttctcctccgcgccgcctttcgccttttcaatcgcacgctcaataatatttttcggcacactgtacgtcttcgcgcgctcaagcaccacttttaacgcctggttcgattccggatctggctcgccttgttttgccgccacataaatctcacggccgaacttcgcgtaaatccggctcgtatttgcgtcctttgatgctttcttttctttaatattgttccacttacggcccattttgttccactctctttcacgaattgaatctgtatgataaatactctgcttctattatacctcagcggttgggttgtttcgagtgtaagacattagaaaaaacaggcacgcttaaaatcaccggagcgcagtaagccgaatgtgagggttattatacaaaacataaaaagcctcccttcatacaggaaggaagtcgcaagccaaaagattcattttattcttattacctattttctacactgtatatcctgacttacgtggtaaaattttgatatcgaacaaaagaaaggatatggtcatgaaagttttcgaagcaaacagcctacccaagaggtgaggtcaatgattgaaacaaatatttctgaacctgtatttcaatttttaggaggtattttccaccaagatatagacactcctgagtcagcacttgaagaatacttagaagaaatacctaaaaaagaacaagaaaacgatgtagtagcactcaaagcgtttataaaaagcgattactcagatgaacaaaaaaatgattttatagaagagactgcagatggtgtagatatcaatagttacggactatccccaatactatggctcggacaaatcattcaaaaaatcgaaaagaatattgaggctttatagattcagggaaaccctattcctatgtttgcacagtctctgataagtttcttaatctttccctctataaactgaaaaaataaccccgaatgaaaggatatggtcatgaaagttttcgaagcaaacagcttgttgacagctgccaaacagcgtgcgagtgaatacaaagaactgcgcggccagatggtcaatctaaaaaaagcgtttcaaggtatggctgacctcggtgacagcgacttttcaggccggggcgctgacaatatcaaagcctttttccaggaccacgccggcgtcacagacagctggcttgatctgatcgatatgaaaatcgcatttctcacaagcctttccggcaaagtcgaagacgcaggtctttccgaatctcatgtagaagaatcttttctggagcacgagctcacccatgccctcagtaaatcaaaggcgattatggaagcgcagaaaaaggacatgcgctccatcctcggagagatcgaagacatcatctcgctcgaattgttttcaaccgaaagcacagaacaaaagctttcttcagctgacaaaaaaagaagcgaaacgatacataaactcggcaaacttgatcacgatctaacgaaagaatacgcagaaaccgaagcaaatgaacattttatccaagcagatttccagcagcttcaaaacgcaacaggcaaaggaaaaagcgccacgccgcttcactacaatgccaaggcgtaccgagaaagcgacatccataagaaaaaagacgagattgcaagacattcggatgcttatttgacgattaaaaaggaagaagcgaaagagcgggagattgaaaaactgaaagaaagactgaaaaactacgattatgcgaatgccgatgaattctactcaatggccaaaacaatcggctataaaaacctgacaaaagaacagcagcgctacttcactcaaattgaaaacacgcgtgaacttacagacggtttcaaaggcgttgccgtcggcctttatgattccggaaaagacgcggtcacaggcctgtgggatatggtcacagatccgggcggaacggttgaagccattacaggagcggtggctcacccgatcaaaacgtatgaagccatttcagcggcaatcgaagaatcgtaccaaaaagacatggtgaatggcgacacctactccagagcaagatgggtgtcatatgcagtgggcaccgttgtgacatcagtcgtcggcacaaaaggcgtcggcgccgtctcaaaaacaggcacagccgccaaagtgacgaccaaagtcaaaacagcagcaagcaaatccgccacagcacaaaaagcgataacggtctcaaaacaaaccgttgatcacatcaaacaaaaagtaaacacaggcatcgaagtatcaaaaaaacgcgtcaaaaccaagttgaatcaaatcggagatctcaccctggctgatattctcccgtatcatccgcgtcacgacttagtgccggcgggcgtgccttacaacgcagtcaacggggtcacacttaaagaaggacttcagaaattcgccaaggtcatcctgccgaaaccgtacggaacctccgcaagcggcagacggacaccggcaccgcatgtaccgccggtaacagtcaaatacggcgagcattttgcgaaatggaccagaaagaaagtattgaagccgaatgtcatctacaaaacaaaagaaggctacacgtacaccactgacaactatggtagaattacaagtgtcaaagcagacttgcagctgggagaagcaaaacgcaaccaatatgcacagtcaaaagcaggtaaaccagaccgtctgacagatgacgacggaggccacctaatcgccacccaattcaaaggctcaggccaattcgacaacatcgtgccgatgaattctcagattaataggagcggcgggaagtggtacaaaatggagcaagtgtggtcaaaggcattaaacggaaaacctcctaagcaagtaaaagttaatatagaacccgtttatcagggagattcactaagacctgtattatttaatgttgaatataagataggtaatcgtagagcgagacaagttactatagaaaataaaccagggggttaatctaatggaaacaaaaaagatggaagttctatatcaaaagatagcagaacaaattaatgatatgatcccttccgaatggagcaaagttgttctttatgcagaaatattagacggctccagagaagtgtattttttctttcaaacaccagaaaacgatgaatatatatactctcacgacattccagaacaatttcaagtcagtaaaaaaatttatacagaactattattagatcttcaagagttatttaaacagttacacaatgaatttaaagaaaataatcccgaagcatggacaaatttgaccctgaagcttgaaagcactggaacgttctcaattaattatgattatgaagatgttattgaatctgatttggacgaatacgaaagacaaatgatttgggaattcaataacttggggattttccctgaagacgaagaggacaaagaatttgttaaggattatctaaatattaaataatgccatcaacaattcaaaggtagaggatcatcaatggaaactcaaaaaatgggtgaactatatcaaaagattgctgaacatctaaatgaaatgattccatctcaatgggaaaagatcgttttatatgctgaaatacttgatgactcagcggatatatacttttattttacaacaccaaataacagtgattatttattttctcattatatacctgaacattttgatgtgagcgaagagatttacgatcaactgctaattgaacttcaagagctatttgaagaactaaaagcagaatttaagctaggcaatcaagatatttggacaaatctcactttaaaattagaaaacaccggaaagttttcaattgattataatgatgatgatgttttatcctctgaacgtgatgaccttcaaagacgagatgtttggaaatatcaaaatttagggatattgcctgaagatgagaacgataaagaatttgtaataagctacttcggtctataaatcaataatggctcagcgcttctctgctgggctatttttgataactaagatttctcgacgattgaaggtgcaaagattggaaactaaaaaaatgcaagatttgtatcagcttattagtcagaaattaaatgacatcataccttgtgaatggacaaagatatatctttatgcagaagtattagatgattccacaatggttctttttcacttcagaacaccagaaaataatcaaattatttattcactagacatacctagccactacaacgtaagcaaggacattttcaagacgttgttaagagagctaagagaactttttgaagaattaagaactgaacacagaaataataacaatgatgtttggacgaaccttacactaacattggatcgtagcggagaattacaattagattataattatgatgatattttagcatcagaattagatggatatgaaagaatcgcaatatgggaatatcaaaacttggggattttgcctgaagatgaggacgataaagaatttgtaataagctacttcggtctataaatcaataatggcccagcgcttctctgctgggctattttttataactaggatctctcgacgattgagggtgaaaaagattggaaactaaaaaaatgcaagatttgtaccagcttattagtcagaaattaaatgacatcataccttgtgaatgggcaaaagtatatctttatgcagaagtattagatgactctaccatggtcctctttcacttcacgacaccagaaaaacatcaacttatttattcacaagatataccagcccgatacagtgtaaataaagatatcttcaacacttttcaagagaaatccgagaactctttagaattgagcacaaaaagaataatgataaacaaaacaggcagcatccagtaaacggatgctgcctgttacatcgttatgtatcgtctgaagaagtcatttattttgttttttaaatatgaaaatagatatgacggtaaatatgatggctgtaataacaatgatccacaagcttgctgccgtactgataaaatggccgtttaacttgtagacgatcccgtaatgcttttcatattcctgtatttggtccgcagaggcatatttaaatactttatcaactgagtctgtcataaacgcttttctgaacagaacggcggtgtggctgatagggaagtacataataatcttctgcacaaacaccggtacgccgccgatcggcacatatactccgcataaaaaaccgatggctgttccgacaatcgtacttaacgtcgaaaatgcattttgtgtatgaataaacagcgttaaaaataaatttatggaacttgagagtgcaactgaaagaataatgatccccaatacttcaagtatatctgtaccgcttaaaagcttgctgcctgttgaaacgagaaaaatttcacagcctaaaaaggagatgaaagaaaagatcaagccgatgacaaatgaatgaatgacatagctcaattggatggtcgcccttgataaaggagctgttaaaaagtcatacgttcttttactttctttatctttcaccataattccgaaagcgcctaaagtcgttgtcacagctgtaatggacagcaatcccgccaccacattcgttcaccattgctttggaatcatctgtcgaaccgaccaaggccttaatggcgtccagctgtgtctgctgtaagaacacggcatataacagaatgacgataaatactgacagcaaagaaagaagcaaaagtgttcgatcacggaagtatatttttatatttctgctgattaaactggataaagacttcatttatgcaatgctcccctttactggcaaactgcttccttgttcttcgataatatggataaacacatcatccatattccctttaatcacctcgaaagattcaatttttccttcaagacctttcaaaatgtcaaacgcttggagagtggactctacacgaagggaataaatagagtttttaaccgtaaaatccagttgtttattttcaaaccatgcagtcggatcaacgccttgcttaaacatcatatgcagactgtcaaacgcatattgatctttcagctgactcggtgtaccctctgcgatcagacgtccttctttgatgaccacaacgttatcagccacagcggcctcctccatgtaatgggtcgttaaaaagatcgtcatgtttgtttcttcctgcagccttttaatcgcattccaaacaaaaactctcgtttgcggatcaagacctgtagtaggctcatctaaaaataatatagtcggtttatggatgatggcacgggcaatatccgctcttcttctttgaccgcctgacaaatcgctgtattttttctccttaatatcatccaattttaaatagtctgttacaaactgatagttctcttgcacttgtgccttgcttaaatgataatattgtccgcggttcatgatattttcataaacggtcaatcgttcatccaaaatgctctcttgaaagacaaccccaatctttttgcggatatgattattctctttcccctcaccaagcgtataaccgtctattaccacttttccggatgtctttttaatcagcgtacagagaatatcgatagtggtcgatttccctgcaccgttcgttcccagaaatgcaaacagctcgccgcgtttgacagaaaaggatacccctttcactgcttcaaatgatccatattttttgcgcagatcggttactgtaataatgtcttgttcttctcccattctgttcacctcgaaaagtaagagtctataccgttgttcactaactttatatcgtcatttccgccaggattttctcatttttatccaactttattatctttttataaataattatcatgattataacaatataatttattattttcgcgttttgttattgggtttaggctcggtggattttctatacatagggatcacttattgattttgcatgaaacttatacatgctgtaatcaataaaccctttatcataaaaagggttttgttaagaatctctaatactattcaaaattcttgtttgtaaccgaaatacatattatcttagaatattcagaaaggagaacgtaatggaaacatgcccttattgtgcaacttcaattcaaaaggataatcagtattactgtagtttttgcttaatgtacatacataatgttcagagagatggcaaacgtgaaatcatagaatatcgtgagcatacttctgaattagatttggataagtctacaccagaactaatgactctgccaacaattgaattatttcatttactgcggctctcaagaaaaatacgcaaacagaagtatgatcagctatataaatctcgacttgaatcagaaaagggaaatgaatcagaaaatgttcaaatcgcaacggatagttaccaatattacacaaagaaaatgtatatcatagagaatatattaaataaacgtctgggttacattccggataggatagataatgtatttcttaagagttatttagaaaaagtaatgattagtaaggagaaaaaacaagatatgaaagtgtattaaaaaagctgcccctctagagtgaatattaataaagggttcctaaaaaggtaccctttattacataaagagatgtatagaaagctatattataggcgttagccaaacatcttctggtactcctctcatgtcacgagttcgtcctgaatgcaaaaaaatgcggattaaaaaaaggcaaccatccctaagggttagttgccttctcttaattccagcacagccacacactccacatgattcgtatgcggaaacatatccacaggctgcacttcgagcgtctgatacccgccatcctcaagcacccgcagatctcttgcaagcgttcctggattacaggacacgtacaccacccgcttcggtttcatgtcgatgattgtgcgcaacagcgcttcgtcgcagccttttcttggcgggtcgacgacgagggtgtcggccgtgatgccttcttcataccatttcggaatgacggtttctgcttctccgactgcgaattctgcgttcgtgatgccgttcagctcagcgttgcgttttgcatcctcaatggcttccggcacgatttcgacgccgtatactttcttcgcctgcttcgctaagaagagagaaatcgtgccgatgccgcagtaggcgtcgatgacggtttcttccccttgcagctccgcgtactcaagcgctctgtcgtagagcacttttgtctgttccgggttgacctgatagaacgatctggcggagatggcgaatttgacgtctccgatgaggtcgtagatgtattcttcgccccagatgacgtttgtttcgtccccaaagatgacgtttgttttatttgggttgatgttctgcacgattgatttgacgtgcgggaattgcgtcgtgatgtcttcgatgatcttcgctttgtgcgggaaatcgcttgttcttgtgatgaagacgatcatcatttcgcccgtgacgacgccgtatctgaccatgatgtggcggagccagcctttgtggcgttcttcgttgtaggctttgacgccgtatgaggcgcaaatatctttgacagcttgaacggcttcgtcgtttttggattgctggatcatgcaggcgctcatgtcaatgatgtcatggcttctttgctgatagaatccggcgacgagtccgccttcccgttctcctaccggcacctgcgctttgtttctgtagttccacgggtcttccatgccgagcgtcgggtgcacggtgacattggacaggtccagcttgccgatccgttctaagacgtctttgacttgtttctgtttaaacaagagctggccttcataggtcatgtgctgaagctggcagccgccgcattgtttgtagatcgggcatggggcatccgttctgtgcgggctttcttccttcagctcgattaagcggccgaaagcgaagccttttttgacgcgtgtcactttgatttgcgctttttcctcaggcagggcgttcggcacgaaaatcgggaagccctgaacctttgcgacgcccgctccttcgtgcgtcaaatcctcaaatgtcacatcatagtattcatttttttctatcgggggtttcattttcatctataatcacctctagttttaccaatagccttgtttcagcgtgctggcaaaccttcaaattcaatgtcagccttcaaaggtttccgatcacgctgaaaagatgacaaaatcctaaaacgaatactgttttaggattttgtccgcgtattaatcatccagctgttccgctttctccttcggcatgatgacgtgaatatgccggtacaggttcacgaattcgcccggcagcatgccgccgtactcgccgtccaggttcagctgcatcttttctgatacattgactttcacacggttcgcttttgtgtaaataatgtgctgatcgttaatatgatcgcctctgagcgccatgctcgcgactctgataaactccgcgagattggcttttttcaaaataattaaatcaaacatgccgtcattcaggctggaatcaggggccagcttctcgaatccgccgaccgagttggtcagcgtcactaaaaacagcataatttcgccttgaaacagcttgccgtcatattcaatctcgacttctgtcggtcgaagtgaaggcagcatttccattccctttaaataataagcaagctggccgagcatcgttttcagtttgctcggcacatcatacgtcagctccgtcagacggcctccgccggcgatgttgataaaatactgaccgttcacctgtccgatgtcgatcgggcgggctacgccgttaatgacggtatcagcggcattcagtatattctctctcggaatgcccagcgctctggcgaagtcatttgtcgtgccgaccggaatgatgccgagtgtcgggcgtttgtctaacggcgcaaggccgttgacgacttcattaatcgttccgtctccgccggctgcgataatcaagtcaaactcccgcaaagcggcttcttttgcggcgttggtggcatcccccgcgcatgtggtggcatgggtggaggtttcataaccggcttgttcaaatttttgcaggacctgggcaagatttttcttaaaaagctcccgtcctgaagtcggattgtatattatgcgtgcacgtttcattatctcatcatcctacttaagagtatccgatccattattaacactaacaacctttaattatactatgacttgagaaaatcgcaacaatatgtacaggaattgccagaagaaaaaaggccccggctccgtttaaggagccaaggcccgctgtcttactcttcttccgttccaggttttttcttacggaatttcgctaatacttcatatacgatcggcacaatcagaagggtaagcagagtcgaactgattaaaccgccgataacggtgacaccgagtcctttagaaatgacctggctgccgccttcgaagcccaatgccaatggaagcagggcgccgattgtcgcgatcgccgtcatcagaatcggacgcaatctcgtagagccggcttccaggagcgcttctctcgtcgataagccttccgcttctttatggatgacgcggtcaattaagacaatcgcatttgtgacgacgattccgatcagcatcagcataccgatcatggcattcagactgatcgtctctccggatacatacaggccggctaatgcgccgatgactgtaaacggaagcgagaacagaatcgcaaacggcgctaatgctccgccgaacgtgatcacaagaacgaggtatacgatggcgattgcggcaagcatcgctaacccgagtttcgtaaaggaatcagcaatatccgctgatacaccgccggtatcaatggatacattgtccggcttatccagtttgtccactttcttttgaacggctgatgacaccttcgtgacgttgtcagaagtgacggttgccgttacgtcagcgtacactttgccgtcgcgtttggaaatggtatcggatgtcgtgccatttttcactttcgccacatcgccgatttttacttcttggcctgcaggcgatgtgatggttttatcctctaattcttttacactcttatactggtctttttctgttttgatgttgacgtcaagctctttgccgtcctttttcaccgttgtcaaaggagactgtgacgtttgggacatcagggcttgggagatttgcgaagccgtcaggccctgcttgctgagtttctcctggtcagcggtgaacgtgtactcatcatatgtgctggaaaggcctgagttgatgtctttcagatctttctgctttttcatgatgccttcgatgtctttgaccgtgcctttaatatcagactctgaatctccgtacacatagtacgttaattcgttgttgttgcctgacgaactgaaattttgtgatttccattcgccgcggctggatgtttttttgatttcttttaagacattgtctttttctttgtcaaaatcaggcgtgtcatcctcgtatttcacgtagaacaatgcgccgtttgagcttccgccgagcggactttgcgagcctaatgaatactgaacggtatcgacatgtttgcgtttaagcagcatgtcttccgctttttgcgcagctttttcagcttcgcttttcgtttcgcccggttcaggcgtgtatgtgagctgcatcgttttgtccgcttgcgcaggcaggtagctcgcgccgatcagaggtacgaggaataaactgccgacaagcatcagaaccgcgatgatagatgtaatccatttatgtcttaatgaccaattcagcacttttttatagaaattggccaatctgcccggcttatgctctttcgctttaacaggcgcgcctgtgagcgattttttgaataagctgtgcgcaagcatcggcaccagtgtgatcgaaatcaacagcgatgcggcaagcgcgaagacgattgttaatgcaaacggcataaacagttcgccgatctgtccgccgaccatggcaagcggcaggaatacggcaatggttacgatcgttgatgacatgatcggtttaaacatttctttcgtcgcttcacgcaccaattgcttcccgcgtaaaggttcatctttcagcctcatgcggcggtaaatgttttcgatcacgacaatcgagtcgtcgactacccgtccgatggcgaccgtcattgcaccgagcgtcattatgttcaatgtgacatcaagctgattcagcacaagaagcgcaatcagcagtgacagcgggatggaaatgatagaaatcatcgttgatttaatatctcttaagaataagagaatgatcacgaccgcaaaaatcgcgccgaaaatcgctttgcttaacatcgtatccaccgactctgtaatcggctctgccatatcaagagtcgagctgtacttgaaccctttgtggtcttttttgtattgattcagttcatctttaatcgcatcggccacttctaccgtgttggcgtcattggcttttacgatattaattccgatgctgtcctttccgttcgtgcgggaaatggattcagcttttttcacatctttaatgtcggcaatgtcagaaagcttgactgtcggcacccctgctgccgcgctttgctgtgcctgctgcatagcctgagcgtccgccgcagatgccgcaccggctccgcccgcttgaccttgagcggcagaagaagatgtgaccggaattctcatatctttcagatctttaattgacgtaatatttccgttaacgacaactgatttttctttgttgccgaatgtgtacaatccaagcggcgtattgacgtcagagccttggatcactttcttgacggtatcttcatcaagtccgtactctttcatttttttgtctttgaaagagaattccacctgctcttcctgctgtccggaaacttgcacggacgcaacgccctgaatgccttcaagcttaggaacgagagtgttttccacatttttggtcaggtcttcaagcgagcttttgccgcttgtcacactgagcgtcaaaatcgggaaagagttgaggctgtaacgggaaatgtcaggttttttcacgtcgtcaggaaggctgacactgtccagcgcttcagcgacttcggttttcgccttgtccatatccttgctgtaatcatattcaatcataaccgatgagacgttttcagaggatgtggacgttacgacgctcactccttctaaattctgcaccgcctgctcgatcggttttgtcacgtcatccgcaacttgactcggagcagctccgggataagtcgtatttactgaaaggtaaggcatgttgacgtccggtatggattcctgcttcatattcataccggcatacagccctgctacagtaacgataatcgtcatcagccaaactgcgaatttgttcttcagtacaaagttaataatgtggttcatcatgtcctccgttaatttttattgactgactggtcattctatataatactaaacggtataactcaacatcgtcaactaataaggcagtaaatttttctaaatttttcaggattaaggggaagcacgtcatgaacgaaaaaaaagagaaaatcataaaaacaggcatccatttatttgccaaaaaagggttttcttcaacaaccattcaggaaatcgccggtgaatgcggaatttcaaaaggagccttctatctccatttcaaatcaaaagaagaccttttgctgtcagcatgtgagtattacatcggcatgtccatggaagaaataaagaaaatcaaaacagaacatcagcataaaccgcctaaggacgtatttcgaaaacaaatcgcttatcaattccaggaatttatggagcacaaggactttatcattctcttgctgagcgaaaaggtcattcctgaaaatcaaaaggtcaagcagtattttcatgaggccaatattcaatttaacatgctgtatcgggatgcgttgctctccgtttacggagatgccgtcacaccgtttttagcggacgcgtccgttatggcgcaaggaattgtgagctcctatattcatttcttgatttttaatgaacatacggcattccggacggaaaacgtggcggcctttctgattgccagaatcgatgatctgattacgggactgataaaagacaatcccgatccgctgctgcctgaggatatcttcactcagcccgcggcggatagagaaagactgcttgcggatattcaaaagataaaagcacagcaggggctgcctgaggacgtcctcgtatcgcttgaagtcattgaagaggaatgcgcaaaggaagagccgcgaaaaccgattattaaaggaatgctgtccaacttggcaggcagcggaaatgagcagattgaaacgctgcgggcttccattgaaacctatttcagcttataaaaaaaagagaccggcgcttaccggtctccgtgtcagcagcgcccttagaggcggctgctttttttatcgttttttgatttcttcaagtaagatcttgttgaccatcggcgggttggcctgtccttttgaggctttcataatctgcccgacaaggaagccgatcgcgcggtcttttccgtttttgaagtcttcaattgactgcgggttgctgtcaagcgcatctgttaccagcttcagaagcacgctttcgtcagaaatctgcacgaggcctttttctttgacgattttttctgcgtcgccgcctttttcaattaattctttaaagactttcttcgcgattttggacgagatggttcctttttcaatcagcttaatcatgccggcaaggccttcaggagtcagcgcgacatcctcaagctctttttgttcggcgttcaggtaagctgagacttcacccatcagccagtttgatgcctgcttggcttctgcgcttttattgaccgtttcttcgaagaaatcagccatttctttcgtcagcgtcagaaccattgcgtcataagcaggcaggccgagctcttcgatataacgcttgcggcgctcgtccggaagctcaggaatggttgctcttacgcgttctttccattcgtcatcaatgtagagctcgacaaggtcaggctcagggaaataacgatagtcgtccgaaccttctttgacacgcatcaaaatggtttttttcgtcgcttcatcgtagcgtcgcgtctcctgctgaatgactccgcctgacagaagcacctgctcttggcgtttttcttcatgctcaagtcctttttgcacgaacgcgaaggagttcaggtttttcagctccgtttttgtgccgaatttctcctggccgatcggacggagggaaatgttggcgtcacaacgcagtgaaccttcttccattttacagtcggaaacacctgtgtattgaataattgatttcagcttttcgagatatgcgtaagcttcctccggtgtgcggatatccggctcagatacaatctcgacaagcggcgtgccctggcggttgaagtcaacgagggaatagccgtcgcccgtatgcgtcagttttcccgcatcttcttcaaggtgaagacgggtaatgccgatttttttcgtttttccgccgacttcgatttcgatccagccgttttcgccgatcggcttgtcaaattgagaaatttgatatgccttcgggttgtccggatagaaatagtttttccggtcaaacttcgtatccgttgcgatttcacagttcaaagccattgcggctttcatcgcgaattcaaccgcttctttgttcaaaacgggcagcacgccgggatagccgaggtcgatgacgctcgtttgggtattcgcttccgcgccgaatggcgtcggtgagcttgagaaaattttagattttgtttttaattccacatggacttcaagtccgattaccgtttcaaagttcacttcatttcaccccttacagttcaggtttcgctttatgatgatctgttgcctgctcaaaagcatgagcgacgcggtatacagtgccttcatcgaagtgttttccgatgatttgcagtccgagcggcagtccgtccgcaaatccgcacggcacgctgattcccggcacacccgcgaggttgacagggatcgttaaaatatcgttggcgtacattgtgagcggatcgctggttttttcgccgattttgaatgccggtgtcggcgttgtcggtccgacgatgacatcgtatttctcaaatacgtcttcaaaatctttcttaataagcgtgcgcactttttgcgcttttttgtaatacgcgtcatagtagccggagctgagcgcgaaggtcccgagcatgatgcggcgcttcacttcgttgccgaagccttctgagcgtgtctgtttataaaggtcgatcaggttgtccgcattgtctgagcggtatccgtagcggatgccgtcaaagcgcgcaaggttcgcagacgcttcggaagatgacagcagataatacgtcgcaagcgcgtatttgctgtgcggcagagatacttcttcccatgtcgctccgaggtcttcaagcacttttaaagcggctaaaaccgattctttcgcttctttgccgacgccttctccgagatattctttcggtacggcgatttttaagcctttaatatcgccagttaatgaagaaagaaagtccggcacttcgacattggcgctcgtagagtccattttgtccgggcctgaaatcgcctgaagcaggaatgcgttatcttctacggttcttgtgatcggtccgatctggtccagtgaagacgcaaaagcgaccaaaccgtaacgcgacacgcgtccgtatgtaggctttaatccgacgacgccgcagaaagaagccggctggcggatggagccgcccgtatcagatccgagtgaaaacggcacttcgcccgcggcaaccgccgctgcggaaccgccgcttgatccgccgggaaccgtatcgagattccaagggtttttcgtcgctttgtacgcggagttttcagtagaagaacccatcgcgaactcatccatattcagctttccgatcgtgacggcttcagcggcttgaaggcgctccacaaccgtcgcatcgtaaatcggatcgaagttttcgaggattttgcttgagcatgttgtgcgaagccctttggtcacgatgttgtccttgacgccgatcggcattccgaagagaagaccgtgttcagaccgtccgtcaaccgcttcgtcaagttctttcgcgtaagcgcgggctctttcttcatcaagctgtaaaaacgcctgcaccttatcatccacggatgcgatccgtttgtaagattcatcaacaagatcggaaatcttgatttcttttttatgtatcatttgtttcagttctgtgattttgtgatcaaataatgacatactgtctccctcctttaatccagaatagatggcacacggacatagccgtctttatgatcgggagcatttttcatgacatcctcgaccggaaggcctttacccgcttcatcttctctcattacgtttttcattttcagcacgtgtgttgtcggttccacgttatccgtgtccacttcattaagctcctcggcaaacgagatgatgctgtcaagctgttctgtgaacatttcagcttcttcatccgtaatggcgagtctcgccaaatgagcgacatgctttacttcttctatagaaattcgtgacataagatccacctccgcataattctccgtttcgtcatataatactgatcatatcaaaaacgagccctctaaagcaacaaaacgccgccttctgaggcatgatgaaaccctctctattttatcctaaatcggggagaaagagaaacgaattatatgtcagaaaatttttacttttataatttattggtagcgttttcatctttaagctgttctatgctgccggggattttttccttgaatgggccaggtttcgagagttgattgatcggggatactttgttaggtttagtaaccatagcctgcacaaaatcatgcattcagcatgtcatgatgactaaaggcttgccgccggcgcaaaagtccggcactactaatctgcagaggtgatgcaacatttacttaaaagaagagagggtccagaaacgtgagtattgaattaattatatctcttggcatttactttgctgccatgctgttaatcggctggtacgcattcaggaagacaacgaatattaatgattacatgctgggcggaagaggactcggcccgttcgtaacggcgctgtccgcaggtgcggccgatatgagcgcatggatgctgatgggagttcccggcgcaatgttcgcaacggggttatcgaccttatggctggcgctcggtttgacgatcggcgcgtattcaaattatctgctgcttgctccgaggctgcgcgcttacacggaagttgcggatgatgcgattacgattcccgattttttcgataaacggttccgccactcgtcatcattgctgaaaattgtttccgccgtgattattatgatctttttcacactgtacacatcgtccgggatggtatccggaggcaggttatttgaatcggcattcggcgccgactacaaattcggtttgtttttaacggcctgtgttgttgtgctttacacgctgtttggcggtttcctcgctgtcagtctgactgactttgtacagggagcgatcatgtttgcggcattagtgcttgtgccgatcgttgcttttacccagctcgggagcgtttcaacgacgattgattcgatcaacgccgttaacccgaaactattggatatctttaaaggcgcgagcgtcattagcattatttcttatttggcatggggactcggctattacggccagcctcatatcatcgtacgatttatggcgattaaagaagtgaaagatttaaaacccgcccgcagaatcgggatgagctggatgtttatttcagttgtcggctcattgctgaccgggattatcggggttgcgtattctcatcacttcggggtctccgtaaaagatccggaaacgattttcattattttttctaaaatcttgttccatccgctgattacgggcttcttgctgtccgcgattttagcggcgatcatgagttccatttcctcacagcttctcgtaacggcaagcgccattacggaagatttataccgcgcctttttcagacgggaagcgagcgataaagaattggtcatgaccggacgcctgtcggtattgatcgtggccgttatcgccattttgctttccatgaatccgaacagcaccattcttgatctggtcggatatgcgtgggcaggcttcggttcggctatcggcccggcgctcttgctcagtctgtactggaaacggatgaatgaatggggagcgcttgcggcgatgattaccggggccgcggccgttttaatctggatcacgacagggcttgccgcttcaaccggcgtatacgaaatcattccggggttcttcctcagtctgattgccggtattgccgtcagcctgctgaccaaaaaaccggccgatgcttcttatcagctgttcagccggatggaagctcttttgaaaaacaagaaatagacaaaaagccgtcagattttatccctgacggcttttttcttccgcacttgtcctgctataaatactgtgagaaaatcatatcaatttattataagaaaaattgcggaggtgctgtgcaaattgagctggcctatcgaaccagacattttattaaagctgggcattgccacgctgatcggcatgatcatcggtcttgaacgcgagctgaaaaacaaaccgctcggactgaaaacctgtatcgtcatcgccgtcagctcctgtatgctgacgatcgtcagcattaatgcggcatatcatttcccaaaatattaccgaatcatgatggatccgctccgccttcccgcccaaatcatttccggcgtcggttttatcggcgcgggcgtgatcctgcgtaaaagcaatgacgtcatatccggcctgacgacatcggctatcatctggggcgcagccgggctcggtctggctacaggcgccggcttttataaagaggcgttcgcaagcctcttgtttatcctgatcagtgtcgaatttcttccgtggctgatcagaaaaatcggtcccaaccgcttgaaggaaaaagatatccgcgtgagaatgtctctttccgataaagacaaaatgaccgagattttaaaggaaatgaaaagcaaacagctccgcattcactccgtccggattgatgatctgggtgaaaaagaatttccgattatggaagtgaaagtcagtgttcataaaaaccgctacaccactgacgtctattatgatattaaagaaattcagggtgtcgtcggagtgaagtgtgatacgctataaaaaaacgccgggctggattcagccggcgtttttctatttatacgaatgcagaaaagttatactccgtaatcggggtttcattttcgatatcgcgcctgaaggttttcagcatctcaagttcctcgtccccgagtgaattgaggtcaaacgcctgatgcaataatccgtagatcagcatatggcgcagccggaggaaatccgggatgtgttcaagccatgcaggatcaaggtcattttcttccctgtagcctttcataaagtgagtcatgaattcacccgtaaacgcggccttgtcttcatacgggatgaccggataccacaacatgttgtacagcagaatactgatatcattcacaaaccaattgtagccgatatcatcaaaatcaaatgcagtgatttttccattgtcccaattgaaattgccgtggtgcagatcggcgtgcacaaggccgtagttttcagggttcttcggcaaacggcgcagtttttccattagagcatccgcccgctcaaatacgagatgctgatctgcgggcacgtattttctcagcttcagctgctcctcttcatcccattcctgccttttatataacggatcgctcagacggtagcttttcgtcagccggtgcatgttccccgtgtactttccaagctcgtaaaacagggttccgttccagtctgattcctccactttgcgtccgggcgctttttcatagactcttactaaaaacgctccgccttttccatccggcacttcttcgacatctttgccatttaatgagggaatcggctttgctgctgaaagccctccctttgccagatgatgaagccattccatttctccgagaatatattccggtgttcttctgatcgtatgcgtaatttttaaaatataaggttcgttatctttcacaatttcatatacgtagttctcggcgtccgcaataaattgaaacttggtaaagccgtatatttcacctgcttcagcgagcaccttatcttcctcaaaaatcgctttaatatctttatgcatgctgattcacccttttcataacgtttgtaggcggtgtgtgtactcagcaaatgtcattcatcaacattcctgcccttcttttttcacagcagattagtaacatccgcttagaaatgaaatgtgttttcctattaattcctaattatacaaatatcttaacatacctcattcctcgctccaacgatatcacaataaaaaaacccttgctcatacagaaatgaacaagggcatcttggttaatcgtaaatatggacggtcggttctttgtcacccgcattgcggacgatcagcgcttcctgcccgtcagacgaggtaatgttaatttcgacatcaactgaaccttttgaataataatccatcagctcacctgttaagtattgggtaaaggcgatgacttcgcttttcccgtaaaattgcatcgggatttcaatcttcatttttctcatttcatcgttttcgtacattgccgttccgacgactccggtgtaattcgggaagtagctgtcgatggcgtttttgaagcgtttaaatacttcggaatcatcagggtatttctttgccgtgtctgtatccgccggatagaagacgtacttttctttgacatcatcccagtttgaaatggtggatgagccggccttgacttctgtttttgcaatgtaattccccggtacgattgatgttttcggcgcttgtttataaagggcgacggtaatcggcacatttttcaggttatccattttccgaaggcggttaacgacttcctgggcgatttcttcaccgtggctgcggatcgttttgtcactgagctccacttcctgctgcggatcacctgtattttcacggtaatagtatacagagttgagagcgagaccgatcatgataccgccaagctggatggaatttttatcttttcttactaagtaatcctgctcaagcatggacgctaagtaaatcgggctgttttcatttttctcttttgccgatcccgagcttggcagcacggggtttaagccgagattctgaaaattggcgtctgcctttttcgcctttttcagatcactgccttcttttttgcggtcaagccagctgagtaccgtgtcctcatctaaatactggccttcctgatacaaatagtcatccgtcgggaacgtgtcttgagcgagccgcatcagacccgtctcgaattcatcgatgtccagcctcgtgttcagccggtccgcggtcaggccgcgcgcttttccggccttaaacggaagcaccattttatagtaggaatcagagatattatatttcggtatgatcgctttttcagaggactttgccgttttctgcgtgatctcttcctctttgttccccccgaaactcggcgaacaggccgacagcatgagtactgccgccgttgccgtcgccgccaatgccaacatctttttcaatagaaaacactcctcttatttctttagctctcccaatagctgtgcttcattccatacttcaatgtttaattcctgcgcttttgtcagcttgcttccggccgcttctccggcaatcagcaagtctgtttttttgctgacagatcccgtcagctttccgccgagcgcttcaatctgcgccttggcttcatttctggacagctcttcaagctttccggttaacacgatggttttgccggcaaaataagagtcgctgtcctccacttttacttttttcgggcctttgtagagtgtgttcacaccgagttcctcaagttcattcaatagctcaagcatttcttctttgcggaaataggtgataacggcatcggccatcttttcgccgatttcatccaccgcaagcagctcttcttccgtagcttgtttcagattttccaggctttcaaaatgcatggcgagtgttttggccgcttttgagccgataaaacggatgccgagaccgaacagcaggcgttccagcgaattctctttcgacttttggatggagctgatcagattgtcagttgatttttcccccatccgctcaagccggatgacctgctctttcgtcagcttatacaaatcagcgacattacggacgagatgttcacggaaaagctgtgtgatgacacgttctccgagtccgtcaatattcatcgcgttgcgtgagacaaagtgaatcaggccttctctgatctgcgccggacattccggattgatgcagcgcagcgcgacttctccttcaatgcggacaagttcgctttcgcactcagggcagctggtcggcatattgaattctttttcttccccggtccgctgttcgattaagacattgacgacctcagggatgatgtcacccgcttttttgacgaccactttatcgagaatgcggatatccttctctttaattaaatcttcgttgtgaagggatgctcttgagaccgtcgttcccgcgacttttaccggttccagaacggcggtcggcgtaatgacgcccgttcttccgacattcagttcgatatcgagaagttttgtcacgacctcttccgccgggaatttataagcaatcgcccagcgcgggctttttgccgtatacccgagctcttcctgctggtcgagcgaatcgactttgatgacgattccgtcaatttcatacgggagatcggcccgcttcgcctgcagctcttcgatcatttcaatgacttcatctatcgtggcgcattttttccgttcctggtttgttttaaaaccgagctcatccagaaaatccaggccctgactctgtgtttccacacccatttcgtcaagctccgctatactgtagacgaagatgtcaagatttcgtttcgctgcaattttcggatcgagctgtctgagtgagcccgcagccgcgttccggggattggcgaacggctcctcttcatgtttcagcctttcttcattgagcgcttcaaatgactgtttcggcatgtacgcctctccgcgcacttctatagaaagattccgtttcattttcagcggaatgttgcggatcgtttttaagttttccgtgatatcttcgcccgtcgttccgtctcctcttgtcgcgcctctgacgaaatagccgtcttcataacggagagaaacagcaagaccgtctattttcagctccacattataagcgacgccgtcaccgacagcctgacggacgcggcggtcaaaatcgcggaggtcatcatcgttaaatgcgttgccgagactgagcatcggcgtgccgtgctgcaccttttgaaacgattcaagcaccgctcccccgacccgctgtgtgggcgaatcaggcgttctgagctccgggtgctcttcctctatggcaatcagctcctgcatcagtctgtcgtactcggaatccggcacgctcggttcatctaaggtgtaatattcataactgtactgatcgatggtgcggcgcaattcttctgcccggtgtttcgctgtttctttgtccatcatgttcttcctttcctcttcaggttactgcttttcaatcggcgcaaaagcggcaagcagacgcttcacgccgactgggctcgggaatgcgatatcaagctcggtgctttcgccttctccttttacgctgacaaccgttccggtgccccattttttatggcccgctttatcgccgaccgcccagctgagcgagtcgccgcctgttttgttcgcataggaaacgggacgggatacgggcccgcgttttggctgcacttttcttcccggctgcatgcgaggtgttttcttctcatttaggttctccaataaatcgccaggtatttccctgataaagcgggattccggattcatattggtgcggccgaataaggtgcgcattttggcattcgttaaatacagttcttcttccgccctcgtaatgcctacatatgcgagcctgcgttcttcttccatctcggcttcttccatcagggagcggctgtgcgggaacacgccttcttccatgcccattaagaacacgacaggaaattcaagccccttagcggcgtgcagtgtcattaaagtgacggcatcctttccgcctgattcttcttccttctggtcgagctggtcaatatccgcaatcagcgctaaatcagtcagaaacgcgacgagagacttgtcttcgcttttttgttcgaagtttttcgtcacggaaagaaactcgtcgatattttcaaggcggctttgggcttcgattgatttttcggccttcagcatttctctgtattccgttttctcgagaatttcttctgtgagttccgtaatagacaggtaatcctgcatgttcgtcagattttcaatcatcgcgccaaagccgtcaagcgcgtttgccgctttcgcgctgacgccgatgaaatcaacctgtttgatcgcctggaacattgacattccgttcatcgccgcatatgaagcgattttttctagtgaagtggcgccgacgccccgcttcggcacattgacgatccgcgtaaaactgatgtcgtcgtccgggtttgacacaaggcgcaggtatgcgagaatgtctttaatttctttcctgtcgtagaacttggttccgccgacgatattgtagttcagtccggattttaaaagggtttcctcaatgacgcgcgactgggcgtttgtccggtataaaatcgcgatatcggaaagcttccgccgccccgagctgtgcagctcattaattttgcccgcgacgaattggccttcgccgaattcattgtcgccgctgtaataagaaagcttgatgccttcgtcattttccgtccacaggtttttcggcttgcggtttgagttgtttttgatcacttcgttagccgcttgcagaatccgctttgttgagcggtagttttgctcgagcagaatgacgtttgcgctcggataatctttttcaaaggaaaggatattcgcgatatccgccccccgccatctgtaaatggactggtcggagtcaccgacgacgcagatattttcaagacgggccgcaagctgcttcacaagcaggtattgcgccctgttcgtatcctgatactcgtctacgtgaatgtattggaatttgcgctgataaaactcaagcacttccggcacacgctcgaaaagcttaatcgtcgtcatgattaaatcatcaaaatcgagcgattggtttttcagcagttttttctggtaatcggtatacacgtcactcgtgacctgatcgtagtagccgccggccgtttttgcgaattcctcaggttcgatcagctcgttttttgcgctgctgatggagcctaaaatacttctcggatcaaactttttcggatcgatattccgctctttcagaatccctttaataacggaaagctgatcagccgtatcaagaatggaaaaatttcggttgatgccgattctgtcaatatccctgcgcagaatccgcacgcacatgctgtggaaagtggatatccagatttcatccgcgccgggtccgagaatgctctctacccgctccttcatttctctggcggctttatttgtaaatgtaatcgccagaatgttccatggcgccacgtgtttttccgccattaagtatgcgattctgtgcgtcagcacacgtgtttttccgcttcccgcgcccgccatcagaagcagcggaccgtccgtcgtcttgaccgcttcctgctgaacgggatttaatccgcttaataattgattgctaatgtaattcatatccgttcaccgcctatcaaacatatgttctatcataaatcaatttcgtccgcttggctactttgtctttacagccgccaccgttttaagcgcctgatcaaaatcttcatatacggcatttccgacaacgatgacatcggcatgacggccgaaccgttccgccgtttccgcgtctttaatgccgcctccgtaaaacaggacggacttgtccagcacagccttcgttttctccaccgtttctatgtccgccagcatcccgctgtattccagataaaaaatcgggagatgaagcaaatgctccgcgacccgcgcataggcgagaatatcttctgtttctatatgtgtatccgcctccgtcaaagcggccgccttacaatcagggttgacgatgcagtagccctccgtcacgatttcctccattgacatgagctctccgtattctttcatcgcctgatgatgcatgccgacaatccagtccgcctttttgctgttgagcacactcggaatgaaataaagatcaaacccgggcacaatggaatcaatcgtcgacacctcaagtacgcacggcactaaaaaccgccgcacctttgacatcagtctcagcacattgtcctcggtgatattgtcgcttcctccgatcacaatggcgtcagtccctgattcacaaagccgttccagttgttcatccggtaaatctttattcggatcgagtttaaaaacatgcttccactcgttaacatcgtacatgcgttttcgttcctccattcgtttcttgccatttaaacattataacaaattcgtttggcccggaaaaacggaaaaagacgtcattcacctgattcacaaaaaaagattgcgctccgccggacgggaaacggctatgtttgaaaacagacaatatgtggaatgtcaaagagaaaaaagacaaggagtctgatctcaatggaacaagccattatcgtactgatttgtatattgatttttattattttagttcccgccgcattgtttctctggatatacataagagacgaaaagcaggaagaacattcagtgctgcgcaattatcccgtagcgggaaaactgcgctacatatttgaaaaaatcggacctgagctgcggcagtatttattcagcaatgataacgaagaacagccgttttcccggagagaatatgaacagacggtcatgtcgggaaagtataagagcagaatgatgggcttcggctcagaacgggatttcaatcagtcgggctattatatccgtaacgccctcttcccgaaacaaagggaggagctgcgcgcagatcagacgccgaagatcgacacgatagtatacaagattgacaaagacaacctgctgaaacgcagcgaacaccgcgaaaaggcaaaagcggacccttattacctgcatccggacgatgtgcaagtgatcggccgcgacacatgcaagaagccgttttatgtgaaagggttaatcggacaatcagcgatgagctacggctcacttggcgacagggcaatcaccgccctgtcaaaagggctgcaccaggccggcggcacatggatgaatacaggcgaaggcggcctgtctgagtatcacctgaaaggcggcgcggatattatctgccaaatcggccccgggctgttcggcgtgcgcactgaagatggagaattttcatgggaagaatttaagaaaaaaagccgcctcaagcagattaaagcctttgaattaaagcttgcgcaaggggcgaaagcaagaggcgggcatattgacggttcaaaggtgaccgaagaaattgccgccatcagaaatgtgcagcccggacaatccattgacagcccaaaccgattcaacgagttctcaaatgttccggacatgcttgatttcattgagaaattaaggactgtcggtgaaaaaccggtcggcatcaaaattgtcccgggcagccgcaaagaccttgaagaccttatttcctatatgagttcatcaggcaaacttcccgactttattacgattgacggcagtgaagggggaacgggagcttctttccatgagctggcggattccgtcggcctgccgattctgaccggcctcccccttgttgacggccttttgaagacatacgggataagagataagctgaaaattttcgcatccggaaagctgctcactccggataagattgccgttgccctcgcgttaggcgcggattttgtcaatattgcccggggaatgatgttttcagtcggctgtatccgcgctcaagtatgccacaccaatcattgtcctgtcggagtggcgacaaccgacccaaaacttcagcgcgcgctcagtatcgaggataaacagcaccgcgtctgcaactacgtgctctcattgcgtgaagggctgtttcacctcgccgcggcggcgggcatcagctcaccgattcatttttcagctgaacacatcgtataccgggaggaagacggaagcctgagggaacttcccggccttttgaatcagcacgcataaaaaaaaccgcctgccgtcatcggcagagcggttttttacgtagctgaggaggattctcctttgtttacgcggtcaagcgccatttcataggcgtcgttaccgtaatttaagcatctcttcacccgggaaatcgtcgctgtggaagcacccgtttcgctttcaattttgtgatacgtatttccttcgcggagcattcttgccacttccaaacgctgcgccagcgattggatttcattaatcgtacaaagatcgtcaaagaaacgatagcattcctccagatctttcagcgataaaatagataaaaataactggtccagttcttttccgcgtaatttatcgatttgcatcgtcaaacaccttctcctttactaatggaagctgcatcgagatcaggcacgatattaatccatgtctttcctggcacaaacggaagaatctcaccgccttttacgggcagaatacggccgtctttatattcccagtctgactctataacatcgccgtgctgaagcaggaggcccttcccccctgactgaatatcgatggcccgccttccatctttgtctgtcatgcgatggccggcttcaacaataaaaatgttgtgcatggctaaaggctttccggtctcccggtctgtcgctttcacaccatcagagcttcttgtataagcatcagcttttttatcataatcgtattcgacaagatttgtaatgttttgtgttccataatctatccgaatattgtaggtttcatttcctggttttgcatctgatgtctgaaatgggagcggttctgtttttccgttcagcttgtatcctttttgttccgccgccttcctgatattgtcatacgacgtgtaggaattgtggggcggcttgctgaaatcggctctccaaaacaggcttccgtcaaaatccaaaccgtttatataatcgtaagctccggactccagctgcttttttgcgccgggactccagccatgatggacaaatatgctgttaaacccgctgctgagcgtgacaaaatattccctcgcgctccgcacaggcccgaccgtttccggcatctcactttgaaaaatcgcgagaaaccgcgtaatccggccctccgcgagcgcttcgatgacaacatccgcctttgacagcccggattggggcctcgccttcggatgattgttcactgcgactgcaatcggacggcgttctgcaagcttctgctcagttttcagccccgttaaaggagcttccgcttctttcggctgcacctgatcggcattattctgccggcaggcggcaagcagcaaaaacgcaaaacaaagcatacaaacggttttccatcttttcatatgtcggctccctgcttttatattttaacgcattatcgatggaaagagtacagtttttttcatcacgtcgaatattcctctcggcgtaatgcggatataaggcaggtgtgtgctctgcaaaaagagcagcgtatagatcggatcgcagaatcggtagccccgctcctccagcagcgtcctcagtttttgctctttctcaagcacttcttcatacttctccgcggatgcagaaccgtttaaggcgaggggaatctcatgcagaatcttcccgttttcggcaagcacgattccgccgccgatttctttcatccgtgagaaagcgagcaggatatcttctttattttttccggcagcgataatatctccggttgtcgtgtaggaactgacaaagccctgcacccgatcggcaaaacctttcagcattgtattgacccgccattttccatgcttatcgagaagcgtgagatagcattcatcatgatcaaaagaaagctggtcaacagaattatcaatcgcaatcatatacggctccataatgaccgcgttgcgcatcgtcacacccatcggcattgaaaactgtaaatcatccatcgtcatatcatatgaaagctcaagagggacaagaccgccctttttccaatccgtttctgtaaacgcattcatatttcggccgtcttccctcagcaggatgcctttggagatcaccgtgaccgggtccggattcatcgggtcatcgagaatgttcaatgaagcaagccgtcccggaccgaccacaccgagatagtcgtccatctgataatacttcgcgatattaaaggaggccatattataggcatcgatcgccggaactccttcctccaaagcgattttgattaattcattcgtcatgccgcctttataaaaatgcggcgtcgctccatccgtcgtgtagaagaaatgatcataatgccggaagcctttttgatggagatcctgcaaaatcgttctcaaatcagggcggatggatgaatgtctgagcgaaacatagtagcccaattcaagccgtctcatcacctcgccgccattcatcgcctcgtggtcggaatcagctccgaacagtttcatcttcgccagtgttttttcagaggctccgggaaaatgcccttctatccgcttgcgcagtttttttgtcgcctgcatgcaatgaagcatcaggtcatcgccgtccatgaggcgcggccatccggtcaattctccgccttgaatgacatccgggtgctcaatccattgcttacggacatcaaaagaaagaagctgatcctcattcagcacttcagtctgcagatcatatctggaccaccagaaatattgcaccggctgttttttcagttcctccaatatagtaagcgctttctttttaccgctgtgcaaaagaaaaaacaagttatcattaacaaacgtcgttgttccgaattgagacacatattcggcgagcgtttggggattatatatttgaaaaggatgtgtatgcggttcaatgtaacctggcacaatgtattttccttcacaatttatggtatgaatgtgctctgctgcatcaggaagctcatgaccaacatatacaattcgatctccgtaaatccagacattctttttcagccattgttttaaaaaaggatttaatacgagagcatcccgtaaaagtagcgttggaagcagctttgagtctacaacatccgcctgtgatctgatgtctttatttttccagttaaaggtacgttcggacattcacatactctccttcgcttatattagacccatcgtatcacatccgcacaattatcgcacggctaaaacgttacaaattattgaagatgaatgaaaaactttttctaagggagctgaaatgatgaaaccgaatatcagtttattaaatgccgttctgcgcatcacttgcggcctcaccattttgtctgctgcttcagcgaaatacacgagaaaaccttggtgtaagatgcatctcttctgtatgatgatgggcgcgatgaaagcggcatccggcatcctccgcttctgtccggtgacatatatgttccaaaccggaatgaatcaggatgacagccgtcagcaagaaaaataacaagccgtttcggcttgttatttaatttgtcctgtcccgcgagtctgagaagaatccttctatacgccggaggacttcatcgatgactgcgtgtcacacggcaagccgacagtctaggtcgtcttttcagaagaaaacccgcatcttatatgacgcgggggtttcctcttcatcgctgcgatgctttcagcgcacgggcgccgatgtcgcttctgtaaaacagtccgggttttgtcagccctgaaacggcgctgtacactttatctctcgccgcttcaaatgtctcagcaaatgccgtgacattggcgacccggccgccgtttgtaacaaattgtccgccgtcttttttcgttccggcatgaaaaacggcgatcccgtcttcagcggacgtcaaactgccgatcggagtgcctttcgcatagccttccggatagccttcagaagccagcacaacgctgacagcggccgtatccttccaccttaggtcaacatccttctcatgcagaagatctaagagcacctgaatgaggtcagattccattctcggcacgacaacctgtgtttccggatctccgaagcgcgcgttgaattcaatgacttttgatccgttttccgttagaatcagccccgcgtacagcacgcccgtgaaggagcgcccctctttgaccattgcttttgccgccggcttcacaatcgtttcgactgcgcttctgacgatatcatcggaaatgtgcggcactggtgagtaggctcccattccgcccgtattcggccctttgtctccatcgaaggcgcgtttatgatcttgagcgatgaccatcggatagacggtctccccttttacaaacgccattaaagaaaattcttcgccggcgagaaactcttcaatgacaacagatgcgctcgcctccccgaatttctcatcctcaagaaaatcgtgcaggcattcaatcgcttcttcttccgtcatcgcgaccgtgacaccttttccggcggcaagcccgtccgctttaatgacaatcggcgcgcctttttgctgcacatatgctttcgcctcttcaaatgaagtaaacgtctcgtactccgccgtcggaatgccgtattttttcattaaatccttggcaaactgtttgctcccttcaatgatagccgctttttcagacggtccgaaaacaagcagtccggctttttcaaactcgtcagctatcccttcaatcagaggaacttcagggccgataatcgtcaggccgacatgatgttctttcgcaaacgcaatgagtgcggcatgatcgctttcttcaatgttgaccagcgtcgcgcagtctgccataccgtcatttccgggcgcggcgtacaccgtgtcaacaagcgggctttgcgccgttttccaagccagtgtgtgctctctgccgccttttccgataatcaatacattcacgcttcgttccccctcttaatgtttgaaatgtctgatgccggtgaatatcatggcgatcccgtattcatccgcttttttaatcgaatcttcatcgcggaccgatccgccgggctggataatcgccgtgacgcccgcttttgcggcttcttcgactgtatccggcatcgggaaaaacgcgtctgatccgagcgcgctgccttttgctttttctccggcctgctcaatggcgattttagctgaaccgacgcgattcatctgtcccgctcccacaccgaccgtcatatggtcttttgcaagaacgatcgcgttggatttcacgtgtttgacgactttccaggccagcttcagatcttcccattcctgctcgctcggctctctttttgtcgggatgctgatgtcggcgtcatcaaatccatggacgtctaaatcttgaatcaaaaggccgccctgtacggatgtcagctgtttttctttcttccctgatgcggacacgtcaagcgtgagcagacgaaggtttttcttcgccgtcagtacgttcagcgcttcttcactgaaagaaggggcgataatgatttctaaaaagatgccgtgaagggcttcagccgttgcctgatcaacttcacggttcagcgcgatgatgccgccgaaaatggaggttttatcagcttcatacgctttattgaatgcttcctcaattgaagctcccgtaccgactccgcacgggttcatatgtttaacggcaacagctgcgggttctgtaaattcccggacgatttgaacggccgcatccgcgtccttaatattgttgtaagaaagctctttgccgtgaagctgttttgccgccgcgatggaaccggagacgggaagtgcgctttgatagaaaacagcctcttggtgagggttttcaccatagcggagcgattgttttttctcaaatgtaacggtgaattgctcaggggctttctcaccggcctcgcgtgttaagtaatcagcgattaatgcgtcgtatgccgcggtatggcggaatactttggccgcaagctcgcgttttcttttaagcgaaacgccgccgtgttctttcatctcattgagcacggagctgtaatcggccggatctgtgatgaccgtcacatcctgatggtttttcgatgcggcgcgcagcatgccgggaccgccgatatcaatgttttctatcgcttcatcgtatgttacgtcttcttttgaaatcgtttctttaaacggataaaggttgacgaccacaaggtcaatcggtgcaatgccatgctcattgatctgcgccatatgctcttcattgtctcttacggcaagcagaccgccgtgaatattaggatggagtgtttttaaccgtccgtccataatttcaggaaatccggtcacttctgaaatgccgatgacatccacaccgttttcctgaagaagtttttttgttcctccggtcgaaatgacttcgacgccgagctctgtcagttcctttacgaaaggtacgagatttgttttatcagaaacactgattagtgcgcgtttgattgtcatgccttttcacctctgttatttagtcccagcagctgtttcacaacgctcggataccatttgtgctcaagctcgtgtattgtatgctctatgttttcaagcgtatcgttttcctgtatttcgaatgctttttgcgcgataatcggtccggtgtccatgccttcgtcgacgtaatgcacggtaatgcccgccactttcacaccggcccgatacgcctgtccgacagcgtcaatcccggggaatgccggaagaagcgagggatgtatattaataatgcggcccccgtatgcttcaagcagcgtatctccaatcagtctcatatagccggcgagaacgattaattctgccccgtgcaggcgcagctgttcaataacggcccgttcaaaggccgctttgttttcaaaagatgacggttcaaaggcgaatgacggaatgtgtaaagcctccgccctttccaccgcctttgcctgaggcttatccgtcacgagaagcgagagctccgcatcccacttctcttctctcatgcgtttggcaatggcctcgaagttcgatccgtttcctgaagcaaataccgcaaactttttcatgaaagagccgcaccgccgaaagaaatgccttcgccccgcttgacccggccgatcaaataagccttctcgccctgagcttcaagcgtgtcgataacgtctgtcaagtcctcttctttaacagcaaggacaaaaccgatgcccatattaaagacattgaacatttcttcttctttcagcttgccgtgctcctgcagaaacggaaaaatcggcgggatcggccatgatccgtgatcaatttccgcgctcaatccgtccggcagcatccgcgggatgttctcgatgaatcctccgcctgtcacatgcgccatgccgtccaccttaccgcttttcaccgccttgagcaccggcttcacatatattctcgtcggttccagcaattcttctccgagaggacgcgcaaacggttcatagacagtatccaaatcaagtccgccgtcatcaagaagcacttttctcactagggaaaacccgttgctgtgaaggccgcttgaagtaagtccgattaagagatgcccctcttcgatatgttcaccggtgacgatttcgtctttttccgcgacgccgactgaaaagcccgcaatatcgtattcatcagccgtatacagccccggcatttccgccgtctcaccgccgataagcgctgatcctgactgctcgcatccgtccgccacgccctgaacgatctgctcaatttttaccggatcggccttgccgaccgctaaataatcaaggaaaaacagcggctccgctccttgggcaagcacatcgtttacacacatcgcgaccgcatcgacgccgatcgtgtcatgcttatccattgaaaatgcgagtttcagcttggtgccgacaccgtctgttccggaaattaaaacaggcttttgatacggaagctctgacagatcaaacattccgccaaaaccgcccaggcttcccataacgccgagccttttcgtgcgctccacgtgttttttcattcgtttgacggcttcatacccggcttcgatgtcaactccggcatttttataagcatcagacatccctatcactccttgtcaattcgtttctccttaaaaggcagaaagagaaaggcagcctgaattcccgctgcctttatgtcattttcacattttattttgtcagcaccgcttcttttacgtgaggaagcactgtatcctgataaatttccgtcggatatttgcccgtaaaacaagcgaggcattgtccgcaattggtgtcttcaaattttcggccgactccttttaacaatccgtctacacttaagaaagaaagcgtgtcggcaccgatgatctggcggatttcttccacggaatgagaagaagcgatcagctcctcatgggttgatgtgtcgatgccgtagaagcacggatgagcgatcggcggtgaactgatcttgacgtgcacctctgtcgcccccgcttctctgagcattgtgacaatccggcggcttgtcgtcccgcgcacgatggaatcatcaaccatgacgacccgttttccttcgacaacaccgcggacggcggacagcttcattctcacgccttgctcacggagagcctgtgacggctggataaacgttctgccgacataacggtttttaatgagaccgagttcgtacgggatgcccgttgcctcggcatagccgatggccgcagaaatactggaatcaggcacgcctgtgacgacatccgcttcaaccgcggactcctgggcaagcattttcccgaggtttttccgggcgctgtgcacgttaatgccgtcgatattgctgtcaggccttgagaaataaatgtactccatgctgcagatggaacggttgatattcatggagaaacgctctgatttcatgccttcatcattgatgatcagcatttcgcccggctctacttcgcgaaggtatgtcgcgccgaccacatcgaatgcgcatgtttctgatgcgacgacgtaagcatcgcccatcatgccgattgacagcggtctgagtccgttcgggtcaagcgctacgatcatttctgtttcagtcatgattaaaaaggcataagcgcctttcagcatagatagcgaatttttgatttgatccttcagcgaaaagtgtccgctgcgtttaatcagatgagccagcacttccgtatcggaggaagtctgaaagatgctcccttggttttcaagctgctgcttcaactgtgtggcgttgaccaagttgccgttatgggcgagcgcgaggctgccgttgttttgcgaacggaacaggagcggctggacattttcatatccgcctccgcctgccgtcgcataacggacgtgcccgatcgcgccttttcccttcactttgctcagttcgccgttttgaaaaacctcggtaataagcccctgtcctttatgcgccgtcagtttttcaccgtcagtcgcgacaattcccgcgccttcctgtcctctgtgctggaggctgtgcaggccgtaatatgtgatctgcggagcttcttcatgtccccagatgccaaacacaccgcattcttcattcaggcctttgatttcagcaagcatggaatagctcctttccacgcgcgctcaagttctttcgtttgcgcgtgaaccaattgttgtccgtcctggttttgaatcgccagaagtccgtcagccgttacctcaccgatatgaaccgcatcggccacagccgctttaaacgcctcatggtgttcttttttcactgaaacgacgaagcgggattgagattcagagaataataatgccgcttccccttctacagtcacgttggcgccaaggttttccgtcgtcatgacgctttctgcaatcgctacgcctaagccgccttcagacacatcatgcgctgattgaacgaagccttttttaatcgcgtcaagcaatgctttttggcgtgacagctctatatcaagatcgatttgcggcgctttgccgtaaatgcggccttctgtcattttttgcagttcgcttccggcaaactcaggttttgtttcgccgatcacgtatacaagatcccccgcttgtttgaaatgctgtgtcgtaatatgagcggtatcttcaattaagccgaccatgccgataacaggcgtcgggtagatcgccgttccgttcgattcattataaagtgatacgtttccgccgatgacaggagtgctgagaatattgcacgcctcgctgatgccgtcggccgctttttcgatctgccagaaaatttcaggtttttccgggtttccgaaattcagattatccgtgaccgcaagcggttcggcgccggagcatacgatgttgcgcgccgcttcggcaactgcgattttcccgccttcttctggatctagatataaataacgggcgttacaatccgtcgtcatcgccagcgcttttttcgtgccgcggattctgagcactcccgcgtcagagcccggagcgaccaccgtatttgtgcgcaccatgtagtcatattgatcgtacacccactctttgctggcaattgtcggctgctgcagcagggcaaaaagcgtctctgtcgcatcttttacttcaggcgcgggaacttccgtttcctgaaactcgcggtagtacgcgggttctgctgacggcttgtggtatacaggcgcttcttccgccagcgcgtcgaccggaagctcgcaaacaacctctccgttatggcggaggcggagcattttatcatccgtaacatgacctacggaaaccgcttcaagatcatatttatcaaaaatatcgacaatttcctgttcacgtccgcgttcaatgacgagaagcatgcgttcctgagactcggaaagcatcatttcgtaagcggtcatacctgtttcccgctgcggaatgagatcaaggttcatttcaatgcctgagccggctttgcttgccatttcagcactcgaacttgtcagaccggccgcccccatatcctgaatgccgactaaggcgtcgcattggatgacttctaggcatgcttccaggagaagtttttccatgaaaggatcgccgacctgcaccgcggaacgtttttcttcagatgaatctgacatttcttccgatgcgaaagtagcgccgtgtatgccgtcgcggcccgttttagcgccgacgtacatgaccgtgttgccgacacctttcgcctggccttttttaatatctttatgatcaattaagccgacgcacattgcattgacaagcggattgccctcatagcttgcgtcaaactgcacttctccgccgaccgtcggaattccgatacagtttccgtatcccgcgattcccgccactacttcttcaaacaagtacttcacacgaggtgaagtgagctcaccaaatcgaagagagtttaatacagctatcggacgggcgcccattgagaaaacgtcacggatgatgccgcccactcccgtcgcagcaccttggtatggctcaatcgctgacggatggttatgagattcaattttgaacacgaccgcctgattgtcaccgatgtcaacgattcccgcgccttctccgggaccctgcagcacgcgttcgccgctagtcgggaatttgcgtaaaaccggttttgagtttttatagctgcagtgctctgaccacatgacggaaaaaatcccgatttccgtgtagttcggcaatcttccgataatagattcaatgagtgcgaactcgtcatcactgacacccatttgctgatagagtttctcttcttttatttgttctttacttggttcaagcagtagcgacatgagtttccctccaatttttcacgatagaccggaacaatgtaagaccgtctgcgctgccgagcagttcatcgactgcgcgctcagggtgaggcatcatgcctaatacgttgcctttctcattcacgacgccggcaatgccgctgacgcttccgttaatatcgccgccgtatgtgaaggcgatttgattgttttcttttaatctttcaagcgtttcgtcatcacagtagaaattgccttcgccgtgggcaaccggaatcgtaatcgattgtcctttttcataggaagatgtgaataacgtgccgccgttctgcacgattaattcaaccggtcggcagatgaactttaaatctttgttgcgtctcatcgcgccgggcagaagtccgagctcctgcagaatctggaatccgttgcagacgccgagaaccggttttccttcggcagccgcttttttcacagccggcatgatgtttgcgaatctggcgatggcgccgcatctcaagtagtcgccgtatgaaaacccgccggggatgagcacgccgtcaaatccgtcaaggcttgtttcctcgtgccagacatactcgacttcttcgccgagttcgtcttttacggcgtggaacatatcaatatcacagttggagccgggtaacacaatcaccgcaaatttcactgtgcgacaacctcctcaacttcatatcggtagtcttcaatgactgtattggcaagaagcttttcacacatttctttcacgagcgcgtcaagatcgcggtcagatttttcaatcgtcagctccatgtattttccgatgcgcacatcctgcacttcattgtaggtcatgctgtgcaatgcatgctgcaccgcgcttccttgaggatcgagcacactttcttttaagctgacataaactttcactttatacattatgaaatgcctcccagtcttttgaaaatctcttcatatgcgtcggttaagcttcccaggttccgtctgaacaaatctttatcgagcttttcgtttgtgtctttgtcccacagacggcacgtgtcaggagaaatttcatccgctaaaagcacccgtccctctgcgtctaagccgaattccagcttaaaatctattaatctgacgccgcagtcttcaaaaatatgctgcagctcttgattcacctgttttgtaatcgatttgatcgtttccacctgctcaggagccgccgcttttaaaagccagatatgatcttctgtgatgagcggatcgccgagtgcgtcatctttatagtaaaattcgataatcggctgcggaagctcagttccttccgggatgccgagacgtttcgacatgcttccggcggcaacgtttctgaccacgacttcaaggggaatgatggtcacttttttgataagctgctctgattctgaaacacgctccacaaagtggttgtcaattcctttggcgtgcagatgtttgaaaatcaggcttgaaatttcattgttcagacggccctttccgctgatctccgcttttttctcaccgttaaaggctgttgcggaatccttgtagaccacgcggagaatctgttcgtcttcagtttgataaattcgtttcgcttttccttcataaagaagattattgttcacaatattcacggaaggcctcctaacccgaatgttgggaatattcaatctatggcggctgaagaagccgcctccggctggcttcttctataaacctaaacgctcaaagatcaagtcgacgtttttcaaatgataattgtagtcaaagcaatcggcaatctgttccggtgtgagacgggacgtgattttttcctccgcttcgacaagctgacggaacggcacttgtttttcccatgcttccatcgctttcggctgaaccgtgtcatatgcttcttcacgaggcagacccgtgtcgattaaagcaagaagcacgcgttgagaatagatcaaaccgagtgtgcggtccatgttgcgtttcatattttccgggaataccgttaagtttttgacgatattgctgaatcggttcagcatgtaattcagcgcgattgtcgcgtcaggaagaatgatgcgctcagctgatgaatgagaaatatcacgctcatgccataacggtacattttcgtatgccgtcagcatgtacccgcggatcacgcgcgccatgcccgtcatattttccgacccgatcggattccgtttatgaggcatagccgatgaacctttttgtcctttagcaaaaaactcttccacttcacgtgtttcactcttttgcagaccgcggatttccactgcgaatttttcaatgctcgtcgcgatcaaagccagtgccgccatgtaatccgcatgtcggtcgcgctgtaatgtctgagtggaaatcggcgccgctttcaggccgagtttttcacagacatactgctctacgaacggatcaatatttgcatatgtgccgaccgcgccggaaagcttcccgacttcgatcccttcttttgcctgcttgaaacgttcaaggttgcgtttcatttcttcgtgccaaagcgcgagtttcaggccgaatgtcgtcggttccgcgtgtacgccgtgcgtgcggcccatcatgaccgtgtatttatgttctttcgctttttcttttataatgtcaacaaatctctcaatgtccttgagcaagatctcattcgcctgttttaatagataggaaagagcggtatccacgacatctgttgacgtcaggccgtagtgaacccattttctttcttcgcctaatgattctgaaaccgcgcgggtgaatgcaacgacgtcatgacgcgtatcctgctcgatttccaaaatgcggttgatgtcgaaagacgcgttttcgcgcatgactttgacgtcttctttcggaatgacgccaagctcagcccaggcttcacaggctaaaatctcgacttccagccatgcctggtatctgttttcgtccgtccagatcgcggacatttcaggtcttgaataacgttcgatcattatgctcgtcctccgtctcttttcatccatatgttcgtgatgtcctgaatccatgtttcatcaggcttccgcaaaaatgtcatatgccccattttgcggccttttttaatctcatgttttccgtacaggtacagtttggcttcctttaaaagctccgtatgctcctccgcaagcttcacttcatcaccgagcagattcaccatcattcccggtttgagaagatcggttctgccgagaggaagtccgcagaccgctctgatatgctgttcgaattggctcgtttcacaaaggtcgagcgtataatgcccggaattgtgaggacgcggcgccagttcattaatcaaaaggtctccgtcttccgtgacgaacatttccaccgcaagcggcccgacaagttccaatttctccgcgagctgaacggcaagcgcctctgcccgcttctgaaccgtttcctccgctctcgcgggcacgatgctttggaacagaatattatttttgtggatattttcagcagccggaaaggttgaaatctcaccgtgtactgatctcgtcacgataacggaaagctccatccggaacgatacccagctttcaagtatgcacgtgccgttctctaacagcacagccgcttcatctgtctgtccttcttccttaatgacaaattggcctttgccgtcatatccgccgcggcatgttttcagcaccgccgggagccccagtgcctgaacggcttcctcaagctcccgtccgctgtttacgatccgataaggagcgacttgacagcctgctgactggatcgcctttttttccgtttccctgttttgggtgatgagcagcagctcgcttccctggggaagatatgcatgttctttgagccagttgagcgcctcgtaatcgatattttcaaattcgtacgtaatgatgtcactgactccggccaatttttgaatcgcttcacggtcattgtactgggcggtaatctcaatatcggcgatctgtccgcaaggcgagtctttcacgggatcgacgacagcgactttatagcccatttgttttgcggcgacagccatcatttttccgagctgtccgcctccgataatgccgatgacggcgccggggtaaatcgtttttttatcagacaagctgatcactgctttccagcaccgtttgttttgtcgcatttcttctcgcctctagtttatccgcaatgtcgtcgtcaaatgccgacaaaatttgcgcggctaacagaccagcgttcactgcgcccgctttcccgatcgccgtcgtcgcgaccggcacgccgcctggcatctgtacgatagacagaagagaatcaagcccgttaagcgattttgtctgaaccggtacgccgatcaccggcagcgtcgttttggccgccgtcattcccggcagatgcgccgctcctccggctccggcaataatgacttttaagcccctgtctctggcgctttctgcatattcaaacatcaaatcaggcgtccggtgcgcggataccacctgtttttcataaggaatgtgaagttcgtcaagtatgtcgcatgcatgtttcattgtctcccaatcggaggtgcttcccatgatgattcctgctagcggctgcattctgttcccaccttctcatgctttgtttttcagaaaaaaaagcccggcttatattgcaactatgaggaagcaatacaaaccgggcatggcgcgcgtatcgtcagtcgttcgcttctgcgatatccatgtcagctgtttatcactttcctgcatagtccggccgtttacggcagccgggtagaaacttatgggccatattcccaagattatatgaggtcgtgttttgatttcatgtttatcttaacaacggacttggataatgtcaacgacattatcgaacgatataaaaattctttcttttaatgttcgtgtttagatcaatttcccttcaaatacgatttttttcccgcaaggaacgacttgaattgatccattttctttcttttctgtaaagatcggctcttccatccgccggacgggcatataaccctcttccttcattaaagtgagaatggtgtcaatcgtttcatcttccgttacttcaaaccgtttcttttttggctttgtcattccttaattctcctcttcttcactgctttcacccagaatccgccgtggatcgttttcggctcaaaggcgataataaacgctttttcatcaagcgttttaatcgtatcataaagctgaagctcatatttgcgcggcgtcagaatctgcatggcggtccggtctccttcaagtccgcccgcaacccagcttgtaaccccgtatcctttttcccggagctgtttcggcaggtccagatcgagctccttcgtaatgacgttgactgtaatatagccgagcgccagtttctcttcaattttcattcccactatgacgccgaggccgtagccgagcgcataggcaatgacgttttgaatttgattcagattgccgagcacgagactcaggccggtcacatacacaaggatttcaatcgtactgatgcctgcggcgaaatagcgctgtccctttaatgtcagaatcatcctgatcgtaaagaaagagacatatataatgttaatgatgagaataatgagaaccatacctatactgttggataaaatcgtctgcatcactgattcccctcctctgatactttgaaaagcatcaatccttcaattaaggatagtttaccctcttttcatcattttcaaaagaaaaaaaagcccgccccgcaaggcagactgttaagctcttatcagtgaagcccggcttttttcaatcgtttgacggcttcatattccttctcaagttcactcagcgtgtacccggacagttcctgaacatggtcttgataaaaccctgagcggatcagctttgtcctcaggtgctgctttttccgattaatggcttctcgcaacaacggggccatcttcatcatccctttccgaatcataaagagcagtgccgctttcgaattgctgttgctctcatcatatctcggccgggtcctcaaaacaatacgctttattagaaaaatttgtaaacattgtgaaagacaaatttcgacttataaagggatcagcgaagcagtaaagtactctgaaatgagcggccatgtcacagccgtaaaaacgagcatgatgatgaccgccgcggaaatacagtacatcacgtcagccgcaggcttttcagccgatttgtatagaatctgcacaaactgcaccatcgccgaggcggccataaacaaggtcagcgccgtaaacaccacggtgacgaccggcagattcaatatcgcgaaaatcatccacacgatagagcaggcgacagccggaaccaaaagcgatccgacccctgcggccgcatcccgcatcgtaattttctgtttcatcatataacgtgatacaagccagaccgcgccggccgcagcggcaaaaaagacgagcgtatacacgagaacgacagtaaagccgtcaaaaaacgtatgatgccgctccccgtatccgagaggcctttgctggcttgccctcagctgaaaccaatttccgattgagaaaaagatactgaatacaagcattgaaataagagcatatttaaagcgggaaaagccgtcttccccaacgaccttcaccggtgatgtcaaaatgcgcagtgcgaaacggcaataacgtttgaccgcggcccatgcagaagcgagtttttccgtaaaagccggagccgggcgccgttccttttcttttttcttttgcttttgataacgtcccgcatttctggacattctcgacagcggttcttcatcagtcccctgatgctgtttttcttcttccaacgtttcttttctttcttccgtcatgtcagcaactcctatcaaaaaaatacggcggaatttgttaaacaagaaaataaaacacttatataaggtaccgaagcgtccttcaacagtcaagcggttttcttcacccggacacccacatgacgttttatagtatgtattggttttacggaataggacaaaaacaaaaaaccggctttcctcagccggtttttccgttatttcaagaagatgaaatacaggataaagatgacgaacagcccgtacataatcgggtgaacgctttttccttttcctttgcagatcattgtaatcgggtagaatataaaaccgatcgcaatccccgtcgcaatgctgtacgtcagcggcatcataatcatcgttaagaatgccggcacagccacctcgaatttatcccaggcgatcttaccgagcggcgccaccatcagagcgccgacaataattaaagccggagccgtcacattcgtggtgacaactgacagaagcggcgagaaaaacatcgccagcaaaaagagaatgcccgtcacaacagccgcgaagccggagcgcgcccccgccgcaacgcctgagctggattcaacataagaagtcgttgtagacgtaccgagtacggctccgataacgattgatgtcgaatctgccagaagcgctcttcccgcacgcggaagtttgttttccttcatcagcccggcctgtgtcgctacagccaccagcgttccggccgtatcgaaaaacccgacgaacaagaaagttaaaatgacaatcagcatttgtacggagaagatatccggaagatgcatccacgcctgtccgaaagtcggcgcaagactcggcacgctgccgacaatgtgcgtcggaaccggaatcagtccgcagaccatgccggcaaccgccgtcagaagcattccgataaatacgccgccgtttacgcgaagcaccatcagaatgaccgtcacaataacaccgaaaaccgtcagcagcacagggccgctgtgaatattgccgatagacaccaaagtcgatgagttcgcttcaataatgcccgaaccctgcaaaccgacaaatgtgataaacaaaccgatacccgcgccgaccgccaatttcagctcaggcggaatcgcattaatgattttttcccgcagtcccgtcagcgaaagcgccacgaagataattccggaaattaagacgccggaaagcgcagcctgccatgaaatccccatgccgaggacgacagagaaagcaaaaaacgcatttaatcccatacccggcgcaatcgcgatcggatactttgcaatgagccccattaaaatacagccggccgcagacgccaaggctgtagcggtgaacaccgcgccctgatcaatttttaatgcttccggaaatcccttcacaccgtttaaagacaatgtcagcggattgacgaacagaatgtacgccattgacaaaaaggtcgttaaaccgccgatgatttcattacgatagcttgtccccagctcatcaaactgaaaaaattgcttcaagccaattgcctccttcattctctcccatttattctgcccgttatccgccaaataaaaaacgccccaaatacatttgggacgcttgactacatacgttcagtctgaataaataagaatggattatttatatcaaacgattgagattgatccgtagtcaagccatttacggtagcttggtagaaacttgcgggccatatccccgccattatacgatatctgcatatttgatttctgagtctattgtatcaattcaattttgaaaactcaataaaaaaaacgaacaatcccgttaaaaaaatttggtttattcgttaattgaccaaaaatggaagacggcaaaagccgccttccagacatcattttccgtccgcaggccgaaccggcaccgcgaatgtgatccccttatcatccgccagcaagttcataaccgtttgattgacgtacaaagcgtatgaatcgaatgagaaatcgcgcaacgaatagtctttattggatgaatcatccaattcaaaaacggattccatttcacccgttttaaggttcgtgactttcgccttattccctttcagataatagcctttttcatactcattaactgatggccaggttttcatttttttcgtattgccgagaccgattgactcaccgacattgatcagctgatcttcatccgctttgctgtaattaattcctgtgaattgataatcgacgatcacccgtctgccttgctgtttgatctttttgatggtgatgccgacatgatgatgtttcgttttataactgacgggcagttttgttttcagaggcacgatttctcccggctctgattctgtttttatatcgcccgttatgaaaagtgttttcgctttcgggtctatcggtttgctgaattgagtttggccgcgtattcttttcccgccgccgggaagattctttctggcgccaagttcaatattcgacgccgtcatttcataatggtttccggcatcatccgttgcctcgtaaatcgagatggcatcatttttggctgcatcatagaagtcgatagaatacaggagagccgatcccgtcgttccgttttccgcccggatatcgaaaaagcggtataatccgtgatttacattcacagctttcgttccttcaagagaaacggacttttgttttttaatagggagtgtaaagcgccagtttcccgggatatccttgatttgtgtaatgacaagcggaagcttatcaccgtctttcagctttgagccgtccgtgaacaggcgaagctgtcccgcgtactgcccgtctttcatttttttcatattactgctgtcataatcctctgctaacatattccatggatctttataatcaacttgaaaagagatgctctcctcatctgatttcaaattgtcaacggtaaaattgtaaacgagctgtccgctgtcgtaatacacacttttcactgtcaccgtgattccgcgtgattccgctttctcattcagttttgtcaccaaattgcttttaaacagcgcagaacctgccttatcctgaaacagactgtaaatttgtccggcaacaggaatgtttcccatagccgtattaacggagggcatgaataagcctgaggacaaatacagaataaacaaagcagcagcaaccgcgagtccgtttatcagttttcttccccatctccgtctgacggcgccttcttttccggcacggacagcggcgctgtgtatcacatttttcaattcagctttcggcacgtcaatgtcctgatacaattgcttcatttgatgcttttccatatatgtttatcctccttttccagctcctgcttcaatgcttttctcgccctgtgcagatgcgtttttacagtgccttccgccataccggtctgttcagcgatcatagcaatcgagaaatcttgaaaataataaagctgaatggtcagctgtatatgttcgtcaagcgtttccagggcattccgaagatctatgtattcttcaatgttcttattctccgcgcgcgtatcatgctgcggctcaaacgggatgacgtctccgtgctttttcctcatcgcaaaaatcgtatgaagcaaaatccggatcagccacgttttaaaatatttcggctccttcagctgcgcgatatgaagaaaagccttgtaagccgtttcctgaacagcgtccagcgtatcttccttgtgatgcaaatagagataagctgttttatataaagtatcctggtgtgcggtgatcagtttttcaaaggctgcggcatcaccttttttcgcctttttgatcaatcgttcttccttcaccttatccacctcctatgctgttagatatgaatcaaggcaaaacggtttcaaaaagatgaaaaaaaacgcctcttttttaaaagagacgtttttttcttcatttattcccattcaatggtattaaaacattataagaattaatttattgaatatcaagccttttggggtttgtagttccttgatttagaagttaccattaaaaatattgctcccccgtgttctgaatattatgggagggggtaaatactgtgatttattgttttagttgaccttataataaaaaaagcgcactaaatcgaattgaaaggtgcaaaaacatgattacaaatcaacaattagtcataaacaatttggaagaaaaattaaaatcatttacccatacagttagcggagagcttacaaaggaagaagatttcatcatagcaaatacaaaaattcctactgatacatttaatgtagtattgccgaaatctccaaatatcaaaaatacagttaagatcagacatggaatcgataatttttcatataaaaaatatccctttagtatttggattgatgctcagtatttaactgaggattggacaaaacttatacaagaatatgatctaaaagaagcggaacgtaatgtaatgatgaaacttgaaaatactcttaatgttgggcaaagaatttcccatcagcttatgattactgctgtgaaaaatgatgaagaacttttaaaatatatagacgtattcatgagcttatttgaaggtacaccagaaaaagatgcactagaaagttattttaatacgttttcacaagtaaaattaggttcagaagttcagatgtttattggatgcatagatgaaatgcctgtaactaccggtttattaatagaaaccaaagatagctatggtatttatgatgtgatgacaaaagaaacatttagaggtaaaggaattggcagtgaaatgtttcaatttcttctaaagcaaacaaaggataaacaaaaaccagttgtattacaggcttcagaggatggaaaaaatatctataagcgatttggatttatagatgtcggagaaatggttgtatttgaatagagggtttctttaatttgcttaatttgaacaaactttattctaaaacaacattaattattatcccattgtggaatactttttctttaaaattcacggttcaattaataatattggatcaattgttgctataaaagaaaaaagagcttagaacccttataaaccaaggattctaagcttcttttgactattcccactcaatcgttgcaggcggcttgctcgtaatgtcatacacgacgcggttgatgtgtttcacttcgttgacgatccgtgtagaaatcacttcaagcacatcccaagggatacgcgcccagtcagatgtcatgccgtcaattgatgttacggcacggataccgattgtgtaatcatacgttctcgcatctcccatgacgccgacgctgcggatgtcaggaagaaccgtgaagtactgccagatatcgcgctcaaggccgtggttcgccacttcttcacgcagaatcgcgtctgattcacgaacgatctcaagtttttcttccgttacttcgccgagtacgcggatgccaagtccaggacccgggaacggctgacgccatacgatatcatccggaaggccgagctctgtgccgagcgcgcgcacttcgtctttgaaaagggtgttcagcggctcgatcagttcaaactgcatatcttcaggaagtccgccgacattgtgatgcgatttgatcgtttgcgccgttgcagtaccgctctcgataatatccgtgtaaagcgttccttgcgcaaggtaatcgatgcctttcagcttgtccgcttcatcatcaaacacgtaaatgaattcgttgccgatgattttgcgtttttgctcaggatcagaaacacctttcagcttgtttaagaatctgtctttcgcatcaactttaatgacattcatattaaagccttcgctgaacgttttcatgacgccttccgcttcgcctttacgaagcagaccgtgatcgacgaaaatacaagtcagctggtcgccgatcgctttatgaattaaagcagccacaacagaggaatcaacaccgccgcttagcgcgcaaagaacctgcttgtctccgactgtttcacggattttttgcatttcgatttcgataaagttttccattgaccatttgccttcacaatcgcaaacgccgaatacaaagtttttcagaagatcattgccgtattcagagtggcgcacttccgggtggaactgaacgccgtaccaattcttgtccgctttgctcatcgctgaattcgggcagtgatggcttgttgcgtcaacagtgaagccttcaggaacttctacaaccaaatcgccgtggctcatccacacaacctgttcttccggaagatctttgaacaagtcaggggttccttgaatctgaatgttggctttaccgtattcgcgctggcttgccgcctcgactttccctccgaggtaatgagtcatcagctgcatgccgtagcagatgcccaatacaggaatatcgagttcaaagattttttcatcacagcggaaagatccttcatcatatacactgttcggtccgcctgaaaggataattccttttggattcatttctttgatttcctcagctgtcaacgtatggggatgcagctcgctatatacgccaaattcacggatccggcgggtaatcagctggttatactgactgccgaaatcaagaacaagaatcatttcattcactaacttcgtcatggttgtcacctaatctcctctaagtttttgacacagaaaaaacggaggacacacgttcagccctctgtcgcgcaagacttgtccggaagcccggctttttaacgctcccgggctcccatttaacattcatttattctaacaacaggacggtatgcggtcaagactatcttcttttaattatattttcccacaactgtcccgattcattccaaagctccgctgcattatccctgcggtataaggcccgctcatagagcagcgtcagctcggacatgtcgtttgtatggtacgcctcgtcaatcctcgcggcaaaatcgcgcagcgtttctccgtctcccctgctgaatccttttcgtttcagctggcggagcagcgcggcatatgcgtcgaaaaagacgtcttcacccgttcgccgcttcaatctggctgctgtaacgtgcggaatccagcgcgcccggagcacccaggcgagtgccgccgcggctgaaatcacgataacgatggctgcatacggccacaggtgtgccgcggttttgttgcggatcacaggctgcggtgccgcacggtgatcccgctttttcggtgttttttctttttccggctttgtttcctgacgctgcttgtcagacggtgaatccgaattccccgctgagcctccgctgtcttttgccgcggtatgattttgctctgacgtaaactccgtcggattggtgaagccttttgtcggctcaaacgtcacccagccctgatcgggaaaatacacttctacccacgaatgggcgttgttgtttgtgacttcataaatgtggccgttatggtcgcctgcccctttatattcgccggatgtatagcccttcacccaacgggcggggattcccgcagagcggagcagcacagccattgccgatgaaaagttatcacaatatcctcttttcgtttcaaacagaaattgatcgacataatcctgattgtgctccggaaccgcgacatcctgtgtattatacgaaaatgcggaagatccgagataatcctcgatcgccttcgctttatcgaacatattatgatgatcccgcgtcagtctgtccgcaagctgtctcactcttttcggaaggctgtcggggacctgtaaataacggtcattgaattgattctgctcacggtatcgtttcactttcacttttctgagatcattcagcttaaagacgggcgcctgaaaagtcaccgtgtaccgtcccatattgcggatgttgcccacttgttcactgaccggcgtaatttgctcggtgtttccgttcatttcaagctgaatcgagtgcttcggtttaatattggagacgccgatcggatacatgacgtgattatagagataattctcatcaatggacacctgtgccgtataccgtctcgtctgcacactccggtcaaaccatatatcttccacgttgccgcggttcagtttataggacatgccctgatcggtctccacccagcctttccccgtgtatgtatccttcgtttccacccggaagtacgcccgttcttttcccttccatgtgaaaaccggcgtatcatcctgctgaaaagggccgcccaatgtttcatcatgattgccgtagccgattttgctttcggcggagggcacttccttgtggtttgttatttttttaagaaacggcacggggtccggccagttcgggtctgatttcggagccgccagaccgaacacgacggaagcgcagataaacagcatcagcggcagaaaccatttgagtatcaatctttttttaaacgctatgtgttccgtaagccggatgcgctccatatacaaaagccccatcatcaaaaagccgataaagacgatccggatgacggcgtacgcggcatcataaggagtaaacgtatcaagcacggtgatatacgccaccgtcatgataaaaaagaataatattttccgctgatagatcacccagtaatgcagcaaatacacgagcagccataaaagcacaaaaaacagcaatgtgcggaatgacggattcatgtcattccatcttccggacccgatgtggcgggcattttgcatcacgtcccgcaaaaaagaaacgagccattccggctgaaaaaccgaacctttataaaacaggatgtgaatactgatcaacgtaaacagaatgcaggacggcacggtgacgtaccacctcatccggaagaatgacagcagaaatgccaaaccgataaaaacgatgaaaaaaccggtatgttttgtatccgtaaaattgtgcagcggcctgagccattcccataacaataaaaaagcgagaaaataaaacagcagcagactcagcctgcttccctggttctcgtcatgcggcatggcgcgccacctctctttctaaacaacatgggacacccgtttgtccctgatcatttgcaccttaatatttttttgagcgaagatgagagcgagtttccgttctttctcagaaagcgcggcattcgtttctttcgccaaaaacaccgtcatgtcagcacggccgggctcagcctgtttgagaaggtcttctgtaagactgcccgtcacgacggcaatggaagctttgcggacgcgcggatccgccagctcttttcctaaacgcccgcctgcatcggcttcttccgattctgaagctgatgccaggtaacgcagcatctttctgaaatgccggtctccctcccggacgggaaatacggtccggtcactccccaatgaaataaatcctgctggagagcccttcacaagcgccgtgtaaagcagggatgccgaagctgataccgcggcttcaaacgatggggacggtctgcagtccaaaaggagaatcatattcacactctgcagcgggtcaaattccttcgtcatcagctcatttcgccgcgccgatgttttccagtcaagtgcggaaaaccggtcgcccggctgataatttctgacgctcgcagccattgcggagcggtgtacctgaaacggagcgccggcagccgcaccctcttccccggaggcggcctgcggcttatagtgaacagacccgtacgccgggaaaaccagaaccgcatccgtaacggaaaacgacgccgtcttgtccaaaagcccgagaacatctcccgtccgcactcttatcgtatgtaaatgatgctctccgcgcggcacctgcggcagctcatattgtaacgtcagcttcctttgaaaccacggaaacacgagctgtttcgcactgcgcctctcgccaagcgtttccggcatcacatcttcaatgaccatatatgtcagcggaaacggcaggcgcctcgtcagcctgatggtgacagacagcctgtcgcctgaggttaactgggcggaggacacgtcacgcgccacctgaaacgcccgcagcgggtacacagcgaccagcccggcgtaaacggtaaacggcaaaaacgcataaaataaaaaccagctcacaaatccgccctgaaacatggcataagaaaagacagccgccgtcagtacggccaacataagcagcttccagccatatagaagccaatgcatcttccttctcattagcggaccgacatcctttggacgggcactttttccgtttgcatgatgtcttctataaccgcttccggggtcacatcgttaaatttcgcctcggcggtcaagatcattctgtgcggcagcgtatacggagccaaatactggacgtcatcaggaatgacgtaatcgcggtcatgaagcagcgcgtacgcctgcgcggctttcattaatgagattgaaccgcgcggacttacgcccagatgtacggacggatgccggcgggtatgctgagtaatgccgacgatatacgctttaattccctcatccacccgcacctgctccaatttttgctgaaggctgataaactgttctttagaaatgacgggctcgattgtttcaagcggattgcgcccttcctgcaaagacagaacttgaagctcttcctcggcagtcggatagcccatgcgcagcttaaataaaaaccggtcaagctgggcttcgggaagcggatacgttccttcatattcaaccggattttgtgtggccatgacgaaaaacggctcagccagccgcattgtctttccgtcaatcgtgacattcccttcctccattgcctcaagcagggaagactgcgttttcggagaggttctgttaatttcatcagccagcacgatattccccatgatcggtcccgggcggtattcaaattccatcgttttcgtattataaatagagacacccgtcacatctgacggcagaagatccggcgtgaactgaatcctcttaaagtcagctccgatcagcttggccaaagcgcggaccatcatcgtttttccgactcccggcacgtcttccagcagcacatgcccttttgcgagaatggcggccagactgagtatggcgatatcccgttttcctatgatgatgttttcaatatgctcaacggctttctccagcagcggatgcagctcttctttataagccattcttctcctcctagtcatctctcaaatttcaattatcgtaacctaactttaccacaaaatataaacagtataaaaaaacgtttccagcgaattgtttccagtctgaaaaaggaaaaagctccctttagaaaggaagctttatttcagctggagaggctccatatgaacgtgtgaatggtcaatggcatgttcctctttcatcttgcgttctacctcatttgcgatctcatgactctctttaatgttcagatcagacggcacttcaatgacgacatcaatatgaacggagctgcccagatatctcgctttaatatcttttaaacggctgacgcccgcaatctgttcaatcgtctttttataatcagaaatatgtttgacatcaaaaccgtcagtcagcgaatgagaggattccttaaaaatatcccacgcggttttgcagatgatcaccccgatgataaacgcggtaaccgtatccacccaagccaaatggaactgtgaagcaaaaattccgataaacgtgccgatactgacgagcgcatctgatttattatcagcggccgcagctgaaagggcctggctgtttacctttttggcaagccctttcgtatagcggcagaccatcagcatcacgacggcgctccccgcggccgtccaggcggctatcatatccggtgtttcctctttaacggaaaaaatagattgcgcggcgctgaacagcacttgcattccgacaagcatcataataatggaagcgatgagtgacgcgacggtctctgcccgaaaatggccgtaaggatgatcttcgtcaggaggtttctgagagatgcgcaaaccgatgaaaacagccgcagatgccacgatatcagtcgtattatttaaaccgtcggcctgaagcgcttctgagtgaaacaaataaccgatcacaagcttcacagccgacaatgccgcatatgcgccaatactgacaatcgctccggtttcgccttttttcaattcatgatatctctccactgaaaatcctccttcccgttcaatttttccttcattatcatacaaagcaaagacacagtgggtctatagaaacatgattcactttccacagaaaaatagtaagcatagaacatttatgcgctcaggaaacttatttttattcacgaaacccctctcatcccaatcgtatcaaggattctcgccaccctatgttcatggaattattttcaaacccattaaaacacaaaaataacagaaaattatttcttttccttccggcaccttctgctgtacggacgagaaaaaatgtcatattttcttacatcactttcaactgtctgtggcatttatgatagaataatacttgtcggaatattcagcataaacaagccaaaaggaggcaaagaatgaatcagcctaactctttatcaaagggattaaaaacccggcatatgactatgatttcaattgccggcgtgatcggcgccggattatttgtcggaagcggatccgtcattcattccaccggacccggagcgattgtctcctacgctttagcaggattattagtgatttttattatgagaatgctgggggaaatgtcctccgtcaacccgacaagcggttcgttttcacagtacgcgcatgacgccatcggtccttgggccggttttacgatcggatggctgtattggtttttctgggtcatcgtcattgctattgaagccattgcaggcgccggaatcatacagtactggttcccgggcattccgttatggctgacgagtctacttctgaccgtgctgttaacactgacgaatatttattcagttaaatcgttcggcgaatttgaatactggctttccttagtgaaggtagcgacgatcgttgtcttcttaatcgcgggatttgcgttcattttcggaatcgtccccggcagcaagccggtcgggctggaaaatctggcgggcagcggcggatttttccctaaaggtccaagttccgttctgctcggcatcgtcgttgtcattttttctttcatgggatctgaaattgtcgcaatcgcagcgggagaaacgtcaaatccggtcgaatccgtcacaaaggcgacccgctcagtcgtttggcggatcattattttttacgtcggctccattgcggttgtggtcacactgctgccgtgggattcagccaatattttggaaagccccttcgttgccgttttgagccatatcggggttcccgcagccgctcaaatcatgaatttcatcgtcctgacagccgttctgtcctgcctgaactccgggctttatacgacgtcacggatgctgtattcactggcagagcgaaatgaagcgccgcggcgttttatgaaattgagtaaaagaggcgtaccggttcaagccattatcgccggcacctttttctcctatattgccgttgttatgaactacttttcacccgactccgtattcttatttctggtcaattcatcaggggcgatcgcactgctcgtttatctcgtcatcgccgtctcacatctgagaatgagaaagaaaatcgaacggacaaaccctgaatctcttaaaatcaaaatgtggttctatccgtacttaacctacctgacgatcatcgccatttgcgccatcttgttatctatgctgtttatcagttcaatgcggtctgaatttctgctgacaggatttattactctgctggtgcttgcctcatatgtattccgcaaaaaacaaaaaccgaaagagagcgcttccgaaagccgggttgcgcaataaccgcaaacacccccctcaaaaaagggcgggtgtttttttaaccaacctgttccaggcagcattaactgtagtacaggatttcaataaatgataaggacaggatgaaaaatggcactagaaaaatttgcagatgaactgccgattatcgaaacactccagccgcagaagaaatcagacggcagcacgtattatgaagtcaccatgaaggaatgctttcacaagctgcaccgcgatctcccgccgacccggctgtgggggtataacggtttatttcccggcccgacgatcgacgtgaaccaagatgagaacgtctatattaaatggatgaatgaccttccggataagcattttctgcccgtggatcataccattcaccattcagaaagcggccatcaggaacccgatatcaaaaccgtcgtccatttacacggaggagcaaccccgccggacagcgacggctacccggaagcatggttcacaaaggattttaaggaaacgggtccttattttgagaaagaggtataccattatccaaacaaacagcgcggggctctgttatggtatcacgatcacgccatggcgattacgaggctcaatgtgtacgccgggcttgccgggatgtatatcatccgcgagcgaaaagaaaagcagctgaagcttccctccggagagtatgacgtaccgcttatgattttggaccgcacgttaaatgacgacggttccttgtcttatccgagcggacctgctaccccttccgaaacgctgcccgatccttccatcgtcccgtttttttgcggaaataccattctcgttaatggtaaagcgtggccgtatatggaagttgaaccgcggacatatcgcttccgcatccttaatgcctccaatacgagaacattttctctctcgctcaataacggcgggaagtttatccaaatcggttctgacggcggactgcttccccgctctgtcaaaacacaatctatcagcttagccccggcagagcggtatgatgtgctcatcgatttctccgcctttgacggagaacatatcattttaacgaacggcaccggctgcgggggcgacgccgatccggatacagacgccaatgtgatgcaattccgcgtcacaaaaccgctgaagggagaagacacaagccggaagcctaaatatctttcaacaatgcctaatgtgacatcaaagagaatacacaatatcaggacgcttaaactcacaaatacgcaagacaaatacggccggcccgttttgacgctgaataacaagcgatggcatgatcctgtgacagaagcgccgaagctcggcacaacggaaatctggtcgattatcaatccgatggggggaacccatccgatacacctgcaccttgtgtccttccaaatccttgaccggcgtccttttgacttagagcgttataacaaattcggcgacattgtgtatacagggccagccgtcccgcctcctccaagtgaaaaaggctggaaagataccgtgcaggcgcactcgggagaggtcatcagaatcgcggcgaccttcgctccttacagcggacgctacgtatggcactgtcatattttagagcacgaagattacgacatgatgagaccgatggacgtcacggataagcagtaaacaaatatcaccccttttagagaaggggcttttttatttatccaaaaagaaaaaataagaagacacttatttgcatatactgtaataacaggaagacgatgcaccctcattggaaatctggatagaaaaaggaattaggagattagggaaaagtatgagacaatgaaggagtgcacgaaaattcataagggaagaagtgactttatgtcttactacaacaaacgtaatcaggaaccgctgcctaaagaagatgtcagtacgtgggaatgcacaaaagaggactgtatcggctggagcagaaagaattttgccggcagtgataccccgacttgccccctttgcggcagtaaaatgatcgacggcgtccgttcgttggtaaatctccaaaacaataatcaaacggcatcaagttagacctcccttttacgagtctcaacatagagaaggcctccatgtctcatgagaggcctttgcgttatcatgtccttttatgatgcaaaggagtaatgaacatgaaaaacgatcggcagcagaaagatctgaaggaaatggcaaaacggcggaaaatgaaccttgccgcacagtcattcatcgaaacgctccattttgccgttccgattctccgttttttcaaatggctcgcctcagccgcagccagctttgttcattaaaaaacacccagcaggcgctgagtgtttttttcatgattggatgacggaaaaactgttgataatgccgttgtcattttcccagactttttcgcattttttcgtatccaaatgataagcataaatggtccggaccttcgcattccgccccgtttcatccttcagacgcttagcgccttttgcttccgccatgaaataaatgatgctgccgtctttagaaaactgaggctgggcatcaatcagcggagcgaagtccttcccgtttgagataatcgtttcatcttttttcgttttgacattcatcagacggatggacgctttttgttccgtccctttttgtgtataagatgtaaagacaaggttctttccgtccggtgacaccgccacgtcgctgataaactgttcaaggtttgtcagatcctgaaggtgttcgcccgctcctgccgcaaaccggatattcgtcggttcagggtcaatccccttctcatttgcctcatccgttttttgataatcctcttttacggaataatgcagaagcgcaaaatcgttttggctgcggttataaaagaagctgcttacactgtcgtctttctcatcggcggcgggatacagattttcataacgtttcgttttcaaatcaaaagatgcgagacggaaaatatcttcatccgcttttccgagacggaaataaatgtgcgtcagatcctttgataaaaacagactgtcagcgcttgccgttcctttataaagcaccgtcttctttttcgtcttcagattaagcttatacagacgcatctcattttggtcattattcccgacaaaatagagcacctgatgggcatcatccagcgcaaacgccggatatgccgaaagcttttcctcgtacagcacgcggccgtcctcgtaatatttcgtcatcagatctttgtctgtaatggaaacaagcagcttgtcatgaccgccggagacaacggctttcccgccgccgtcgctttttcctttaatcagtaaaacggccgcgatgaccgccgccgccaaaacggcggccagcaacatccagatccatcgtttcttcttcattatcaatctctccgtcaatcagaaaaagcaagaatcagtgtccttgctttttaagatggtctattttaatagctgtagtgtccggatactcttcctttgcttaatggatatccgagcgctttgaacgctttcgggctgacatccaatacggcattcggcagacggcctacatcatttttgtatacggtgataacctttttcggttttgctttcgcataagctctgattttcgttccgtttctcggaacgtcaaatcctaattttgtcgcgcaatcccagtgtcccagttttttaccggaagatccttttttaccgactccattataccatgtaatattaccgttcacttttttagcacttgcatcagaagagtaactgatcgctcccagcgtgcttcctgctaaaatcaataaggctaagaataacttcttcaagctttcgtcctcctgattctttattctaggcaaaattatacaccaagaagacgattataatatttcaatcactttacatgttcattacaacgtgatgagacatgcacataacgacggcacaattacctgttctatataattccatggtaaattatactacaaaatttaattcattagcgttataatattcatagagtatttctgcattcaatatggactttttataaggcctattgatagttgcataatatgatatattttgagaaaaatcaggctttaggaagcaggcactttattccttttaaccgtggttcatattgatcatgtacctatactcgtttcaatcagactaggagtgataatcaatgaaagcggcaagatggcacaatcaaaaagacattcgaatcgaaaacattgatgaacctaaagcagaaccgggtaaagtcaaaattaaagtcaaatggtgcgggatttgcggaagcgaccttcatgaatatttgggaggcccgatctttattccggtcggcaaacctcatccgttaacaaacgaaatggcgcccgtcacgatgggtcacgaattctcaggagaagtcgttgaagtgggcgaaggcgtcaaaaattacagcgtcggcgaccgtgtcgtcgtggaaccgatttttgccacacacggacatcagggagcctataaccttgatgaacaaatgggattcttaggcttagccggaggcggcggcggattttctgaatatgtatccgttgacgaagaattgctgtttaagcttcctgaagagctttcttacgaacagggcgcgcttgttgagccgtcagcggtagcgctttacgccgtccgccaaagcaaattaaaagcgggcgacaaggcggcagtttttggctgcggaccgatcgggctgcttgtgattgaagccctgaaagcggccggcgccacagatatttacgcggttgaactttcaccggagcgtcaggaaaaagcgaaagaactcggcgctatcatcattgatccgtcaaaaacggacgatgtcgttgaagaaatcgctaaacgcacaaacggcggcgttgatgtttcttatgaagtaacaggcgttcctgtcgttctccgccaggcgatccagtcaacaaacattgccggtgaaacggttatcgtcagcatctgggaaaaaggagcggaaattcatccgaacgatatcgtcatcaaagaacggaccgtaaaaggcattatcggataccgtgacatcttcccttccgttcttgcactgatgaaagagggctacttctcagcagataagctcgtcacgaaaaaaatcgtgctcgacgatctgattgaagaaggcttcggcgctttaatcaaagagaaaaaccaagtgaaaatcttagtcaaaccgaactaaaccgttcagctgaatatcagacacatccgaaaaagagccgttccggctctttttttcatctcatcgcctttccttccttttccttttaaaaatgaccccctctgcgcaaactattttttaccctgtcccgtctatccttaggcagcagcctatgaaacgtatttttaaaaaaggagccctttgaagcaatgaagaacgaaacagccaaagcgtcgcttgtgacgtgcataactgagcgcaaggaagacttttaccggctggcgtacagttacgtaaagaacaaggatgacgcgttagatattgttcaggaatcaattcaaaaagcgctgacatcggtcgaatccgtcaaaaaccccgatgtgatcaaaagctggttttataaaattttagtgcgcacggccattgattttctccgcaaacagaaaaaactgaaagtgatggacgatgaaacgatcgagtttttaagccgcggaaaggaagatcactacaaagacacagaccttcacgaagcgcttgatgacctgccgcatcaatataaaaccattatcattctgcgtttctttgaagacctgaaattagaagaaatcgcggacatcacgggggaaaacatcaacaccgtcaaaacacgcctttacagggggctgaagctcatgcgcattcagctgacgaaggaggatctttcttaatggaaaagagattagaacaattaagagaagagtataaaagtgtgcccattcctaaggaactggacagcattgtcgaaaaagcccttcagcagaaaccgaagaaaaaacgaatcgtgatgtggccgacatccgcggcagtcgctgcggccgtcttatttaccgccgttgtcaatatcaacccggatgccgcacaagccatgtctaaaatccccgtcatcggcaaagtcgtccaagccatcacattcacggagatgaaggaagaaaagaaccaatcaagcattgatgtgaaaacgcccgctctgtccggcctttccgatcataaactcgaagacagcatcaaccggcattatatgaaagaaagcaaagagctgtatcaggaatttatgaaggcgacctcaaaaagcaaaaaaggccaccttagtatttacagcgattatgaaaccgttactgacacagcggatttgatctcaatccgccgtgatatcgaaaaaacgcaagcttcatcttatacgcaaagccgttacatcacgattgataaaaagaatgaggccgtgcttacgttaaagagtttatttaaagatgaccgttatattaaagtcatcagccaaaatattaaagaacaaatgaaaaaacagatgaaagaagatccgaataaaatatactgggtcgaagataatgatatgtcggagccttttaaagccatccgcgccgaccagaatttttatattacagataagcacaaacttgtcatctcatttgacgaatatgaagcggcacccggatatatgggcgtcacagagtttacaataccgacctccgtcatctccaagctgcttgtcggagaccgctacatcagataaagaaagaaaaaaatccatgatatccgcagatcatggattttttctttcgtcccgcaacagccaagatgcacaagggacccttttcatataacagacgccggacgggggctgaaaagtttaagaaaatcacagcatttcattcattttttctgaaacaaaatccccttccgaatgcgtctaattaacggaacaaatggaagactgtacagaaatctgccatagccatccgcaaaacagcgagaatttccgcacacattattggaggaataccatgtcagacaagtcactgcatcaccgctatattcccggactggatggacttcgcgcctttgccgtcctcgcagttatcgcatatcatctgaattttaactgggccgacggcggtttcattggtgttgatatcttttttgttttatcggggtatttaattacatctattatattgcctgcccaaggcaatgccatcacccttgatttgcgtgatttttgggtgcgccggatcaggcggcttctgccggcggcttatctcatgattatcacgacggtcatttgggtcgtattgtttaacagcgagctcctgcataccgtacgcggggatgcggtctcctcacttttttacataagcaattggtggtttatctttcatcagctttcttatttcgacagcttcggctccccttcgccattaaaaaacctttggtcgctggcgattgaagaacagttttatatcatatggcccttcctgctgcttgcgggaatgtacatatgtaaaacacgggcccggcttgcggccgcggtcatgttcctcgcgttatgttcggcagtcgtaatgagtatgatgtatgtgcccggcggagatccgagccgcgtttattacgggacggatacccgctcatttgaattgctgatcggctgcgctttagctttagtgtggccgatgaaacgattatcttccaaacggctgccgagcagaatgaaacacctgcttcacgggacggagcttgccgcttttgccgcgctgctgctttgcgtcttttacacggatgaatatgaacccttcctgtacaagggcggcatgcttttgatcagcatcaccgcagcggttcttgtcgcatgtttatgccatccgagcagctttttgggacatgttctttcatggaagccgcttcgctggatcggaacgagatcatacggaatctatctttggcattacccggttatcgtactgagcacacccgtgcaggaaatcggaaatccggtttattggcactgcgccgtcagaatcggtgccactttcattcttgccgagctgtcttaccatttcattgaacagccgatccgcactgcgggcttccggccatttttacgccgcgtgtttctgaaccgctttctggaatggaagacgtcctctgtcatcagcagaatgtcgctcggccttattcttgccgccattctcgtatttgcgggcgggctgtcaggaatagccgaagagaaaaaacagccgcaatggacgtacgcgcaaaatgatcagcaagaaaccgccgcctcttcgcacaagacggccgatcacgatcaaccggcaaaagaagatgacagcaagaaaaaacacagcggcgaaaaaacagacaccgcgtcagacaaaaacaagaaagaaccaacagacaaatcaaatacaaagaaaaacgaagagaaaaaggaacggtcatctcaaaaaacggctgatccaaaacaaacacagcctcagcaagacgtgctggctatcggtgactcggtgatgctggacattgcgtcatacctgcggcagtccctccctcatgtcaccatcgacggaaaggtaggaagacaagtctctcaagcactccagctcacttcggaatatgcgtcatttaatcagccgaacaaagcggtcatcatcgagttagggacgaacggctatttcacaaacagccaaattgaatcactgatcagctccttttcaaaagccgatatctatcttgtcaacacgcgtgtgccgcggcagtgggaaagcaaagtaaacgaatcattgcgccggcaggccgagtctcgcaaaaatgtgacgcttgtcgattggcacgcaaaagcattgcagcaccctgaatacttcacaccggacggcgtccatctcatacctgaggggtctaaagcgctgacatccctcatcgttcaaacaatgaaatcatgacaaaaaaaagaggccccaaaaaggcctctttttcgtatatcgtcaggcaagcttctgtccgcaattcgggcaaaaattcgcgccttccgttttcgttccgcagttcggacagaatttcggcttagccgctccttccgagccgtttgccggtgccgtcccctgattctgctgactttgatcttgctgcggctggttctgctgattttggttcatttggttcatcatttgatttgccgcattcattcccatcatcatgcccgccatgtctgaggcggcgccgcttccgttcattttgccggatgacattccgtccgtcatggaaatctgctgatagcggttcacatcgcccaccatgccgtaagaagcgtttttcgtaatcatatcctgaacttcctgcggatagttaaagctcataatattgaagcccgtaatcgacatgccgtctccgatcagctgcatatcaagatcttcttgaatcccttttccgatttcaaaggaattcgactgcagattgaacatgtcttttccttctctggtgatccatttcatcaaaagctgatcgagaatagacgtaatccggattttaatgtcctccactaaatagctgtctttgacacccgcaatcttatcaatcaatccgatgtagtcaatgaccttgaagttaaatgtgccgtttgcgcggatcggcataccgcccggcatacctgccgccggaatattgatggcgttttttgtgccccacttcacggtgaactccttcgtattcacgaacagcacttcagcccgcatgccgctgttaaagccaaacttaaacccttttagtgtagatagaaacggaatgatttctgattcgatatcataatcgccgtcatcacggaaaattccttcaatcttcccgttgtataaaaagatggcatcctgtcccggccggatgatcagacggctgccttttttaatttcacggttgttccatttatagaaaaccatgtcatctctgaattcttcccattccaccacatttgctaactgatttctgaaaaaacccatgtatgctcaaatcctttacatataatttaaaaacttcccttgcttccgctgtaactcgtgccgcccctcgtgactccgccgtcattgtcattatctttatcaggctttttttctcttgtaacgtcggttcggatatatgtgtcgtgctggctcagcacttcagacgtatcgtgatccatatacgtgctgccggtgacggtgaccttgccgccggaattgtacaccatcacagtgacggtgattccggccgcggctgcggcaataatgagctgaaaccaccatgtgagcagcagattgtcagacttgtcgtccgggcttttccccatatctttataagccatcttgatgtaggtctgaaacgccttttcataatggcctgcggaaatatctgacgagatcgtatttctgatcgtattcagccggctgttattcaaatacgtctccgcctttttatatccggagataaatacttcccgctttttcatatcaatggtcaaaatcgccgtgcttccgctaaaatgactgtcataaaaatcaccggcgtactgctcgatgtccttaccgcccgttccgtttgcggtaagaatgataaaatcggtatggcgctttgccccgagcttcccggccaattcctcaagtttcttcgtttcatccttcgttaataaatgagcattgtcataaacatattgcttctgttccgcggcagacgccgatgtatgtaaaccaaaagacagcatcagaaaaaggacgaagcagaagagacacgctttttttatcgatactttcatcaaaaaccgcctcctatcataagtgagacgagtcttaatgctaaaaacgcaccggcggttatgccgccgaaccacgcggccacttttccggcactgatcggcggtttgccgacaaccttgcccgtctgcccgttcatcgcaaaaatgtgttcagcccgctcatagtcgtagctgaccatccagaccggaagcagtacgtaaaagctgctgattttatcggtctgaatctgctcatccgtaatgtcagccgtcgtatatccggagaaggtggatctgatataagaatcaatataatggctgattttatccttcgcccgcggaaagagatcgtcatcggtataattgtacttttccgcaatatatcccgctaaataggccgtattaaactccttcagctcactgtatgagtaaggctccaatttgtccattaattcatcattcattttttctgaagcgtcgaccggaattttgagataatcaagattgatatcgcggtacgcgttgtaatactcggtctccgtcacccggtattctccatcatcatagtgatgcactttcgtacaaacggcattgacctgaaccttgctgtttaaatcaaacatccaaaacggcacgtacatgcccgttatgctcttcacccgatcggcagacataaatcctttcggtgtcagacggccgtttcggcaccactttttaaaagcgctcatggcttcttctttactgatcgtaaaaggaatcaccatcgaaggcgcgagatttcccgataatcggtcggcgagaacggcggctcctccgcaaaacccgcacgtcgtggccgtcgtttccgcctcagtcattaatactgcgccgcagttctcacagcggtactcgttcgcctcattttcggaaaatctcgtcgttatatactcttttggcaggctttcaatctgatcctgccgcccgcagctgtgacatgtcagcatgccggatgaactgtcaaagaccatatcatcgccgcagttcgggcatttataagaaatgatcattctgtttctctcactttctctttatatcggacaaagctgcagcccgctgtctattgatctttactgaaaagcattttctgcttaagcgccgccaattcatcatcgacactgctttgattgctgtcatatttagccgtcagatcgtcaatatcgtctttcggagacgcgttcagctcagccatcgcattggcatgatcaagcgcttggttgaccttgtcttccattctgccgaaagccgtcatcgattggcccgcatttgacacagaggaccccaatttgttcattctctcctgcgtttttgccacagaccacttcgctttgatggcatttcttcgcgactcaagctctccgatatcagcgacaagcttgtcatgcattttgcgcatttgagacgcgttggaagaagcgagctgataagccgtctgcagctcggtcagtcttgattcaacagccgctttcctttccaaaaatgtccgcgcatcggcttcattgccggcctgcaacgctttcatcgcataactttccatcttttcggcatcagcctggcattctgttaacgctcttttcgcccgctgttcctcagccatgacagaagccgtctccgctttcacttttcctaaatcactgttcagattccgcaaatattgatcaaccattttttcagggttttcagctttgtccagtagcgcattgatattgcttgacatgatgtctttaaatcttcctaaaatactcatttttcattttcctcccaaaattaaatagtaacaagttcatagttatctatactgtttttttcgaaaaaagtttcattttctcttgaatttatgtatttttatatgaaaatagtctcattcagcccatttgtgccggcggaaattctttatgaccagatacagtgagaacaaaaaataaacaaacagcccgatcatcaacccgctcactaacggataatgtttcgcagcatacacaaagaaatcaaactgcgaaatctgttcaggacttgtaatcgtatccgtcccattcaaaagctttgaaaatttcgccgtatcattccaatcaaacgaatcagaaacaagctcactcccctgataccaattgacagcggcgagacaaagaaaacaaaaaacagaaaacgcgcattgcacaataagaaaaacatgtttcatgaaaaacattcctccgcggttcaatatcataggccgtcatactatacatgacggcagcagcagaaacttggttttactcagaactgataaaaacgtgattgtatgtacttcacatcggttcaatttactggatgcctttctaaagtataccgtatatcgtaaagagtttcagacctaaataaagaggatgcttcccgaagtccgatgactttcaagaaacatcctccatactttacagtgatacttcaacctcttttaaactcggcagagcatcgatcgcaccgattttggtgcacacgagcgcccccaccttattggcaaatgagacaatatcacgcagcttcgcaaaatcttcggctgccgtctgaatctcatccgtgcgcgccagttgaaacagcgccgcgccgacaaacgcatctcccgctcccgttgagtctattgatgtcaccggaatgctcggaatgatgtcaatatccttcccatttgaaagaagggtcccgcttttcccgagtgtcaccgccacaataccggccccgagctcatgaagaaccgcaacaccttctttatgatccttcgcaccgctgatgatctcaagctcttcgtcactgactttcacaaaatcacttacggcaacggctttttttgcggtgtttataaactctgaaactcttcctttccataaatcctcacggtagttaggatcgaaggaaataaactgtccattgtctttcgcaatcgacatcagccgtaaataggctgagcaaaacggatcagataacaatgccgtcgctgatccgaaatgaaggattttcgcatcgtttaccttttccagatcaatatcatccagcgttaacaaagcgtccgctcctctgttaaacacaaagtcgcgctccccattttgttttaatgaaacaaacgcaagcgttgtaggcgctttctcatccatgacaagcatagaggtatcgacatgtgcggcgtccaatgtctgcttcagaaaatacccgaacggatctttgcctgtttttccgctgaaagccgcgtctccgcccagcttagcaatcgctgccgacacattcgccggtgcgccgccggcactttttaagaaattgcgcccttccgtcaaatcaacatccacatcggtacaaaagaaatcaattaacaattctccaatacaaataacagattggcttcccacattatcacactcgtttatcaattctcaattatagtttcagtatagtgctttctgtcataaatacaaccgtttacatagaatattttaaattttacgtatacttatcttgcagctctttgctccagatcagacatcatctgctgatattttttttcagttaaaggataaaaagaaataagaataatagacagcagaatgaacaatcccggaatgagcgcattcatatttttaatcgcattcaatgacgaggccgtctgatcggtattcgcggcatatccggcgattccgagataaacggccgaaaatgacccggctaacgcaactccgagcttattgatgaaactcatactcgaaatcaccacgccatcagcccggactccggttttccattccgcataatcgacacaatcggcaaccattccccaagcaagcgtatttaaaggcgttgtgaaaaatcccgaaacgaaaagccaaaagaaaataagcggcagcgaagaatacgatgtaaactgaaggcccgcataagaaatcagcgatagcgccgccgtgatgatcataacctgcttccggccccgcttctcagaaaagaaaggaataaacagattgctgatcagcgccgcgccgaaaaataatacagttcctaaaaacacaaattccttatggctgacgttatacgtaaaatagtacaccatcgtgctgagcttaatgttaaacccaatcgcaaacgccaaaaatgcagaaaccaaaatgagcaaaggcttgtttcggaacaaaacggacaacgtttttttcattccttgtttttttcttttttcaggctgaatccgttcccgcacagtaaagaaactgaacaaattcaatgcgatgctcaccgccgcatagataagcgccgtcatctgaaatccaaacgcctgattctctcctccgatagcagttgcaagcggtgtcgcacaggaaatggataacagaatgccgatatacaccaaaatcatccgagttgtggtcagaaccgtccgttcctccacggaattcgtcatccgccccgttaagctgttgaccggaatcgtctgcatgctgaaggacatcccaagcagaatataagtgatgtacgcataaaccatattccccgtctcgccgaaatgaggggtcgtgaagcataagaacgtaaatagcgcaaaaggaaacgccacccacaaaagatacggccttgcctttccccatcttgtattcgtcttgtctaaaatcacgcccataatcgggtcaaaaacagcgtccagcacccttacgataagaaacaaagctgcgatgaccgcaggcttaatgccgccgacgtctgtatagtagaataataagtatgcgtttacaaactgaaagataatattgtacgacatatcgccgaatccgtagccgatccgttccatccaggacaggccgcgatatttcgtctttactgccgctgctttttctgtttcaatcatcatttcccaccccaagaatccgttttcatttttgataagcaagagggagaatgcaaagatcctccccgttcactcagcgatttggatacaccatcacttttaagcattcatttttgtattgaaaggcccgttccatcgcctcttgcgtctgctccagcggatattggtccgttacaagatgcttcgtgtccactatgccggaagcgagaaattcaattcccttcggatacgtattcgcataacggaagattccgtatatatcaatctcgttatctgcaataaacggcacattgagcggaatctcgttctgagaaggcaaaccgacaatcgccagttttccgccccggcgcacggaagccagtgcggattgcaatgccgccggattccccgctgtttcccaggcagcatcaacgcctctgccattcgtgatcgttttgatttcttgaccggcatcctgttcccggacattgatgacatgcgtcgcgcccatttttttcgcggcatctagccgcagcggctccaagtcggtcacaatgattgtgcctgccccgtatgctttcgctgccgcaacggccatcagccccacagggcccattcccatgatcgcaaccgttgaaccgggctgaagcttcgttctcgcggccgcatgaatgccgacagaaaacggttcaatcaaagccgcatcttcataggaaagtgaatccggaattgaaaaaacaaagtcctggcgcattttgatatattggacaaacgcgccgtcaaccggcggtgtcgccaaaaactgtacatccgggcaaagattataacgcccttccttacacgcctcacagcgtccgcatgtgacaccgggttcgacggcgacacggtctcccaccttgaattgatcgacagacgatccgacggcggcaatttctcccgcacattcatgaccgaggataaatggtttttccactacataattgcctattctgccatttgtatagtaatgcagatcagatccgcaaattccgacagccatcaccttaatcaacacttcatcatgattgatgtcaggcacgggcaatgtttcgattttgatttctctcgtgttgtgcataaccgcagctttcatgttttgaggcactgtgtgagtcatttggcaaaatcctttctctgctctgaaatgtaagtgcatacatttttgttttctctgttactgcccctattttatctgcttttccatacgttcaacagcctttcctgctgtataaaaggacagccgcactgtactttttattttttcatatacaaaaaacactgaattgataaaatagtactaataggaggtgcaggctaatggctgaacttgaaaaccggacacattttgcagaactgctggcacctgccgtcaaatcgctgaaacatcatcctgattacaaaatcaaaaggacaaagaatgtaaaagcaggacagtcttatatagatcaaatcgcactccgattaggcgtttcctctaacacgatcaaaagctggatcggacagatgggcgcaaactacattcccggacgaattgatgacggaaagctgttcggcatgatctggatcattatcgaaaagactgatatggattctgaatggctgaccgatcttctggaaaccaccaccattcccgtcatcaaacccgcattgcccgtttggacggcgtcttgtctaaaaaaagcaaaaatactccggaaagacggatcattcggaacgccgagtgatgacgatgttgaaaaagcagtaaagcggctgtttcatgacagaccaagccacgaaacgaatgcgcttacaagaaactccgtcacgcataacttaccgtcacgccggacgggaaactttatcggccgcggctttgatatagaggcgatccggcaatggatgctgtctccgtcaccggtctgtttaatcaccggctgggccggcatggggaaaacaacaatcgctcttgaagcagcctacctttgtgccggcggttcaccagattggttggcattcaacagcatcatctggatcagcgcggactggaaaggattgagcttcagcgattttttaaacacgatcgcctatcagctcggacgcaccgaacaaatcgacaaatcaatcaacgaaaaacggttcgtcgtccgcaatgcattagccgctcattcaaacgaaaaaccggtattgctgatcgttgacggcattgatacagcggaacgtcacattcacgaatttatcatcggccttccgcaaggcgtaaaagtcctccttacggcacgggaaaacgtaaaacagacataccgggacggcctcggggaactggcggccatccagctgagcggccttgaacaaacagatgcccttgatttttttcatcaagaagtgaaccgctgtctgcaaacatgcaacctcccgcaaaaacgggaaaagctggagcagctgttggagctatcgcctgaccttaaaaatgaattcatcttagcagccgccggcaacccgaaggccatggcactgagcatcgcttacatgtcagacgacgacatccccgctccgcagctcattcaagaacttaaacaagcgggctactcattattggaattgtttgaggttctctttggccgcacatgggacagatgtcatgaagacacacgaaaactatggcagacgctttgctttttcgctaagccccctgatgaaaaaagcttggctcaagcggccggattagacgtccggcggtttcattacgcgattgagcaaatgcggtcatatgctttaatacagccggaacgaagcgcaggaagaattcaatacgcagcccatcaaaccgttgtcgcttacggagaacagcacttatctgaaaatcatgattttgcaaaagaagcccgaagccgctgggcgcattattatatggattatgcggaaacccatataaaacgggaacagcccaattccgtctattggagctacttgctgggacggaatttagagcaaatgaaaaaggaatggccgaacatcctaaaggtcattgaatggtcgggcgaaaccggacaacatgacattctgattaaactcatcatccgcaccagccattttctaagcagaatcaacctgcctctgcgaatcgaatacggattaaaagccgccgatgccgcccgtcaatcaggcgaacacacgcgggaagcttactttcggatcgacacggcaggctgggcgctgatggaagtcaacgattcagacggagctctcaggcaaatagaagccggcctgaagatactcgaacaatcaggcgcaccggatcacgacgacttgagggtatggggaaccgccctgcaatcgaggctgctgttaaaaaccggagaaccggacaaagcggcagcaatgctggacggcatcaaagatcagcccgtctcgcccattatccggcacagggttcttctggtccgcggcgacctgagtttcgcccgctctcactacgaagaagccatcacattatacgaagcggcaaacacaaccagcgccgcatacggcggcgaaaaaacgatagaagcctatttcaacctgggcatggcttacgtgaagtgtgatcagctcgaaaaagcggaaaaagcctttgaacagatgctctatgacaaacacaacgcgaatcaggttgagttgatctactatcactacggaatggcacagctgttgtatcgtaaaggggagaaacggaaagcgatggaatcgaatcagaaggcgattcggctgattgattcgtgggagcctgggattgggattcggggtgaggtggagcagctgagaatggtgcttgaaggaaatggtgaagtcacattgtagttaggaaagtgtgagttccgtcttagataaccccctcacaccttatttataaataaggccttatcagtttactcaactgaaaaggtcttttttgctagaatgcatgagcaatttagatggaaatcaaatatccaacccttgatataacaagggtttttgctgtttattggcattattcctcctaacatcatgaaaaattagtttttaataaatatttttgaatcaatgtttagcagtgatgggataacaaatccgtcaaaatgataaaaccagtactagggctacactagaacttaataggatgtcaaactgtatgtggcctttaatgtttaaagctagcagtaagttgaatgatttccaactttgatatttcaagtgatattttatagcttaatttcttccgctaagaattttttagaaaaagtggtaatatccccttgaaatttaattgattatagccgattatatataggtattatattatataaattgggggttttaggtgaagaagcgactctttttattcatgtctttagtactatccttagtttttagcggcttgtagtagctcgacaaatgatgtctcacagggatagtgattcaaaaaataaaaaaagcttgagagactaaagatgactgttctaaaaaagtcgttgcaagcaaacaatatgctgaagcactgggcatgagttaatctgggcattataaagatcatgagagacaaggtaaacgtcggaatatacatcaaaaatacaactgacaaaaacctgaccttttatcctgaccaaggaaatgccgttattggcaattagctgcaaacatgttcttaactgatggagaagtccaaggcggaataaaacaaaaaggcgtatttgaattctctgctccagatgaaaaaaatgatgttgataaagtcaaaagaaattaaattaaactttggagatgttgtcacatagacttcatgaaaaataaagctgtatcaattacagtaccagttaagtaagggagagtttaataatgaaaagaacaactgaatttgttttaggattattgggtggaatttttggttttattggagcgatcatggcattgattattggtggacttgatgcctcttttaattcaagcggtacaagcgaaatcattggtttaggctggggagctgttgtcttatcaattttgggtattgtcgcttcggtagtagttaagaagaaacctaaagtcggaggagtattgcttcttatctcaggaattggcggagtaatttgtatatcaatgttctatttactgcctgctgttcttcttattattccaggtatcatgggacttgtcagaaaagataaaacgacaacaacagcagcttaaagaaaggcccttaacagggcctttcttttttagccaataaaaaacaaaagttcccgatatattaaatttgaattatgaaagaggatgcctcccacaaagtccagcagacttttggaaacatcctcagtttcgggatttcataaagaaatgttattttttcggctaattggggtgatgaaaaacggtcaaacccttggtgtatcaagggttttttccgtttgattacatcatgccacccatagatcaatcactttcaagaacatacattctcattcatttgggcaattcaatatttgttttttcgctcgatcgccctcatatctctcattgatattcatatttggatttataaagtgtgaccaatcgtgtgaccaaaattgaaatcagaaactaaattcgtttatactcccgttaggagttgattcagaatgaccgattttgagcgtaaagtgtatcggattatttttaacatgagccgctttgggaaaaatccctccatggaacaattgaaaaggaaaacgggaaaagatgagcagacgatccgtgctgctgtgaagaatttgatgaggcagcgcgttttgaagtgggataagaaaaaagaagagtggattttctaactttacattgacaattccataagaaaatagtataataatattaacagagctcacacgcctcttgttcttcggaataatgcggaccacagtgagacttttttttatctaaaggatggtaaattatgtcaagtgtacatacccctaaagtctttaaaacacatgaagaacagcttgaaatacttaaacaacgtggtttaaaagttgatgatgacactgaagcattaaacaccctaaaaaaaatcaactattaccgtttgacaggatatatgttaacgatgaaggtaaacgacgaatttcattcagacgcttcatttaatgatgcagtacgcttacataattttgatgagaaattaagaaggattttattgagggctattgagtctatagagatttcatttaaagctcaactggcatatagttttgcagatacttatggtcctttaggataccttttttcagaaaatttcaaccacgatcaaaaaagtaaaaaattccatggagatttcattgaaaaattatctaacacaatcatgaatagcagtgatctttttgttgttcatcatcgtaaacattataatagtaagctgcctatttggggcgcagttgaattacttacgatgggcaatatatcaaaattttataaaaacatgcacagcaaagataagaaagtaatctcaaaaagcttatataatggactttcgcatgccgtgcttagtaattggcttgaggctattactatattaagaaacacatgcgcccactattcaagagtttataataaaaaattctcattttcgattagactatcgccaaagataaaattaaataacagcaagcttgtttcatttatttatattttgaagatattgttgtctaaacaagaatggagtaggtttcttaatagttttttagttttaacagaagagtatgatgatgtaatagaaatgcatcatatgggtttctataataattggaaagaatatattaattgatcccccaccgaaatgggggattttatttattttaagagtgattcaagttttgctttcgtcttcggcccgaaaatgccatcagcagtcaggccatacatggactggaatcgcttgaccgcatttgctgttttcgagccatatgcgccgtcgattccaaaattctttgcgctcttatctgggtagtaatgaagagccgccagagccgtttgaatctgttttacggcctcccctcgggtcaatgggcttgtgactttaaaaacacccgcaggcaggctgaattttgatttttgagtggatttaggctttgacgatgttgctttcttcttgccgccgcttttcagctcgttatcgcttttgatataggagacattcacatatccgtggaatgtctggccttttgaattggtgtattcaacatatccccatccgttgacagttgatccaagctgatatttcacaaccgtaccattcggcaggttaagcaccatggaagaagaagcgctccgttgcgtacgtaaaacaaggccgtcacttgaaaccaccgtgtttttgataaaacggcctttattcgaatcggtgttggttttcgatttgttgttagttggtttgttaattactaccccacctaatcgcgcttttactccattcttgaaatcagtaaacccttgggatctgcttacccatggggccggacagattttgtgtgtaatgtcatagtgccgcacgatgtcattgatcggatcaagtttatacattttgcacagctcggcacaaacttgttctgcgcgggcaatggtatcaggatggaaagtgccgttcttttcaatgcaaagctccacgcctatagataagaaattcgcattcggtttcagtgcagcgacgccccggtaaggctgtccgttgacgaattgctgaacgtcattcgcatgataggccacctcattcaacggaatgatgcaaatagcctctgtacgatcgacaaagatgtgggccgatgcaaacgtctgttttttctcagatagatttctgttctgtgcggggagcgtttgaccaaagtatctataatgattggcagcaggcgcgccggggttggccgtgtaatgcaccacaagtttcttcacgccgttgtttttgattcccggccgcgtccatttattaatatcaatatattggtttttaaatgctgacataaaaaatctctcctattctgttttgaaatataaaaaggccgccgaacggcagcccttacttggttaaatcatgctgttttaaaacggctttttgcttatggcctttttcagtcacatagttgtttttgaaccatgctaccagtgacatgatgatcgtaaaaccgatggagccgcctaaataaaccgcgtccgcaaggtcattcacttgatcatctgcaatcggtagcacatccttaccaaacatcactaaaacttggtttacgagagcaataaaaagaagcacagtccggacgactgtacctttgtcgaattttttcatatgttattttcctccttatttttgcagcaggttatacatgatcgcgatagccccgccgataaaaccggtgctgactgccgttattatggctcctgtgatggtccgtttgatccaagtcgtattttcatcaattttgttcagcttttcgtttaatgaaatgatttgctgatcatgcctgtctgaagaacgctcaaggacactcactcgctgttcaagagtcttttgcccggctttaacctctgttatttctttttgtaaagcattcacttccggtacctccgtcatttgtgacattagtacgcccccctttttctatctcatacgcttcacctccttcgaggcaaaataaaaacacctattcagttacaggtgctggttcactattattttctttcgccgctactgtcgcatttaattgcttttcgagttcctcgcgtttattatctgcaaacgtgtatagcgctttatattcggccagctcattattcttcagattcaattcctgctgtagggaagcagctttatatgctgcaatttgtaactggtcctgaagttgctcttttgtcatttcttgcatgcctttcactccttactcttgatcgggatacgcattaccgcgttcgctttctgtaatttcatcatattccgcttgtgtgatgcggcctttctcaacggcttttctcatttcaacggtcaaaacagttccgtttttccagcaatcctcaaaaaacccgaaaagagcacttcggttctccaatgggctccccccgtttccttttattgattcattaagagattgcaaacccgctgaaggtcatggacttgctcctgcaacttttcctctgtagtcttttccttttctctatcttttgcttcaatatttaataccacgggctcaagcttcatctttgccatcctccttattttgaacgtagattgttataagcccctctcggttgccttgtggatcaacgacaatttgaactggaatcataataagctttttgctcccactgtacccttggtaataaccatcaggctctacataggtttttgtgagcaaatagcttatctcatcagactttatatcatgaaggacatataattgatacgctactttggttgtatcgtccggctgcagatcgaacgaaacagcctccatgggatatgtcttgtctcctttttttatagagccggcagttatttcgattcccgcgctggtttcttctatttcgatgccgtccgcataataaagactcatgttaaaatcccttttttcaatcataaaaattactcccttattgtgattcgtaaaaaataacaatttgaacttttatcgtttttcccgcaactccggcagtagtcccggtccctctcactccaatatcaacagaactggcacttatattttctaatcctaccgtaaccgcattagaatatgcgccaatcgctgtacctaccgctgcaaaaacgttctcaggcgcataataaaaactatcaacaaaaggaatgcgattgtagcgcgcgtacgcagttgcccctccgtcaggcggcagtttaatgtcccaagtaaagcagtaaaccatcaaaccgtattgcaggcctccatgcttgtcttctaattctgtagaaacattgccacccatcaatttgaattcgcaattttttgcattccctgctacaactttggttcccaatggtagcgttaaatctgatgcgtcaacaatcgttttttggcctgatttcagtcgaatgaccccggggacatcaatatctaaattattcggtttaaagcgataaatagtagctgatccttcaaaaagggcctgataacggttatatgtgaacggctctcctatatttttaggattggtagtagcagtaagaagaaaggcgtcttcttcaacagctgcctgtctttccattttcatattaaaatggcttataacttgtccaacatctcctatttctgaatacattgaaatagttggaaccgtttcatatgcggtttgctcgcctgcgccacggagctcaattttgccatcaccaattgagactgttctgtagatttcattagaggaatcaccaggatcgtaaaaccttccttgttcctgcgttattttcgcagaactaacaaccaatttgttgtaatcataatgagagtctctggtgaattggtaaatcttatcaccttcgatatagtattcggcatcttctgattgtgtcagcgcctcgaaacgggccccttttatgtccacaccctctatcgtgataccttttaacgtcccgacgtttattttgtccgctgaaaggtctttgatcttggcgtttgttattgaaccgtcaatgatgtgtaccgaatcaattattgcttcttttagatgcgcctttgcgatagccgcattttgaatagccgctgtcccgatagccgcttcagctactttcgcacttgttatggctgcattttttatatgagctgtttctattaccgccttttggatgtggtcgccatcaataacaccatcaaccagctgagtatcaaacgggctataaccataatcagaaataacatcgcctttgcgcacctgtactttacgaataacaaagctacagggctcagtgtttccgtttcgattatatccgccgattccaattgtgtaatcagagccggtttccggagcagtaaatttgatattaacccttataaattggtcagacggaaaagcagaaatatctttctgttcattgctgctaatctgtatgaaagtgctgccttttttcaaatgaatataacttatgtcggtggtattattccgttttatttcaaatgacagtgtatattgttgatctttgaccaatgccattctttgaatattaacaggcgaggacctgttcccgcatattccgaaagctattctagttgttccattgatgatctgagaaacagtcatttcattaaattctttttcctcaacactgtggctggtgtccgtataatcatagaaccatttagattttaaaagagagccaggtaagatattagcatcatcaaagtttcttgaaagtttatcagcatcaacggccagctgggccagtttttcctttgtgatcgctccgaaaacaatgtcatcagtcaaaatgcgctgagtggtcgcggaaaactgatccgtgaattcgctcgctgtgcctcgtgtgttgattgagcgcaagcgataataccaaacttcatttactcccgtaaaatgctcatatccgcctgttttgcctctgaaaatacgattctcttttaatggagtgaatccatttacttgtgaagcatatacctcataggctgcaatataactggacggatcataatcccatgtcagggccacattctgaaacattgccttgatcactacattcgacggaactggcggggctttgtcagggaaactgccatccgtaacctcgccggcatccggtttactttcccaagtaccgcgatttttttcaattacgctttcaatttgatcaatccggccatctttttgtaatgctgataaaaattgaccgatctctacgacgcaagtattttctgggtcggtaatatcgtattccattgaaataacgcgctgcgatgtctcgattggaatagcgaagtttcgatcaattgcgatcgttgtatctcccaattccacatgttcgtgttcgtggcccggcacgctctcaagcagttgcacggacagctcataattgatttctgtcttacatgcagttgtaatcaaatgattatatgtggcctttaaaagctcttccggctccgttatgtcttcatcattgaattggccttcccgatggatcaactttccatctttaaggcggcccaatcgttctaataaatccggatcgccaacccattcctggcctaaaggcttatcgaccgggtcgccttttgtttttttccattctacttcagagaaatcaataaaacgggaataaccgcccgtctcctctccttcctcatcagtagatgctatggatgctccgtaaccccaaagggctgtcaccgggtaactgataacggtccgccggatattcgttgtatccttatcactctcaaagcgcttcccgctgtctttaccgcgacggggaagtatttttatgattcgtttaacgacctgatttccatcaaattctatagtgtcctgaagctctccgccccatatgttaatcacgtcagcgatacaatccaacgctgtttttttatagaaggtagtcgaattcactccaagctccgccgttacttccgccacccatcttgaccgagaaagaacgttgtccagtacaaactgagcagttttattggtagggcgaaaatcttttacaaaggtttcagcaagctccatcatggcagcttcacaggtaacctgagtgttaatctctccttcttcacttgtatcatccagttccttgatgacaaacagacgcattacaccgtccttatccttgaataccacttgattctcttcgaataggaagcgcgcgtcagggtgggaggcatcggctacaaaagaaaaagaagagcccttgttgagctcttccttgtattttgcatcccagaacgtacaggtttctcgtccgtggctggacagcactgtcaataatttatcatctggtgaaagtatataaatgtcagccatgaccggacctccttacaaatatgcctcattaaatttgatactgctcttatgactgaacttgattttaactggcgtcctgggcggcagcagaaaccaatctgattgaatttgaagtgctgtcatgattaaattaccgctgcaagtgacctttctttttgctgaatcaattacaagtgtgtcaccagcgatgaaatcgtacagcagcttgatcgttttcgatacagacccatcatcattaagaagagccacctcatatgaagtggctttctcttcaaagacgcattcgattgtcgggtctacggccgcatatcccggattaatgatagtctgaatacctgaattaaattcaaaatccttcgccgggccgtatttttttgggtcaggacagataaaagtcaatgttgcagtctgaaagcctccctgttcttcgccttctgaaatgctttcaaagacagcgttatagaatctgtcgggctcatcatgaaaaattaacggtttaggctcttcagtgtgcagaataaaagtcaattcctcctgctttttcttcaactcttcttcactgctgaaggcaaaaagaacctcaatggttatgactcttacagggattcttgtgttccgcaggaaaccgccggggcgattcccgatagtggctgtattcacttctcttcctgtcactccccggccgcccgtggtcttcacataaaagaagggtgatatatcaataccatcaaacgtgattttccattggttaggcagtagttcctgataattgatcaattaaatctcgtcctccttgcgttcgaccttttctgagcgtctgtgacaggtttttctacgccttgaccgaccttcttgctgtccagctcaacaacaatcattctgtcaggcaattcaaggttccggatgtccgcgctcaattcttttctaaccgtgccgagttcgctgctagaaatggatgtgtcatatgcaaaattcagatcctcctgctgaatagtcatggcatcactgacggctcccatagctttttgaacagtgccgataccattctgaatccccacagcgataccagcaggaaccatgatccccacctgatcccgcatcagtctggatggggagtggattttcaattttttcttaatggttttctcaattgtcgatgcgatggagtttgcttctttcgccaactcgcccttcatgttcttcattccagaaataatgccggccattgtatttgatccgatggctttaccgcttttcttcagagaacccagctgttttacatccactgtaagctccccaattttgcggagatagtcatttttcagaagtgccagttctttatttgcggccgaccgtaattcatttattttcttggtcgtcgcgttcttcaacccggttaattcttgggtagcctggtcactggccagcttgtgcttttctttccacagactgacatactcatttagctccgaatctgtcatgcgggctattgcattaatctgatcagctgacccgacacccatttctttcaattcgtctgtgaacgccttcggtgcccggcttgctatttttgtgatgtcagtgttgaacgttttgatcttgtccagctgctttttaagatttgaagtcagcttggagccgttcacattttgacttgagacatcgtcaaatagaccgatggcgttataaatcgcgtcagttcggtcttgcaactcctttttataggcatcgttggccgccttaatatcggcagtcagtttatcattcacttttttgaattttgagagataagtattgtttgcagaaagaatgcccttgttaagtttgtcagccgctttcttttcggcttccttctgctttctggccttatcagtcatagctttttgagtctgatagatttcccgttgaacctttatttgctggtcagaattcagcttgttcttcttcttgattttctcaagcgttttgatataggtattcccgctgatttttcctgtatcgtattttgcctcagctttcttaatctgatctgatactttcttggtatacgccagtttcgccttcgcttccttgcgctgctgctctttcaatagcttcttctgtttatcagaggcgtttttggatgcctgatatatctcgcgctgtatttttcggttttgctcgctggtaagcttgttttgcttctgaatcttctgcaatgttttgatatacgtatccgcgcccattttcttggtgtcatacttcacttcagcgttcttaattttgttggatacctttacctcagccgccttctgagctgcttttgctgcttttgccgcggccgcttttactttggcctgtgatttatcaataccagccgccataccggtgccgacgtgataaccgacctggtcacgcattacccttgacggagaatggattcccagaagttttttcatgccgttgggaatagcatttgccattgattttactttgctcgctaatgctcccgccatgccgctgataccttttattaagccttggatgatgttcttaccgatctgccacaagttaatgccgcggaaaaacttcatgacaccgttccatatgcttgtaattgttgattttgctgatttcattatgccggaaatagcatttttcatactattgaataggcttttagctgtactcacgagccctttccagagccctgtcacaaaacctttaacggcgttccacacgcttgtgaaaacacttttggtgccattcagcatgccgctaaaaaatgacttcaatccattccaaatgctcttggcagtagaagatacagctttccatactgtggtaacaacagtttttatcgcattccaaacggtgctgaagattttcttttgcgtatttagccaactggtgaagaatgttttcaatccattccagattgattttccaactgatacaacgcccttccagatcgaagtagcaattgttttgataccgttccaaatgcttgtgaatgctgttttcattccattccaaacagatgaaaagaacgttttcaaaccattccagacagacttcccgactgacacaatgcctttccaagttgaagtggcgaatgacttaatgccgttccaaaccgttgtgaacgcggttttcatcccattccagagtgatgaaaagaatgttttcaggccgttccaaatgcttttagctgccgatacaattccattccaaacagtagagaagaacgactttattccgttccatgttgatgttgctatcgtctttatacctgtccagacagtagacaaccaactggaaatagccccccatgccgcaattgtagccgattttaccgtgtcccaattcgcaatgatcaaggctaccagaccgatgacagccgccgtaatccatccgataggccccattgcgatgacccatgatgccgccatacgtgccgcctgcgctgccgcttgtgccgcaagcacgacgagttgccggccgaataaaaccatttgcttaccgcctgcaaccaacaaagatataaaattgctgatctgcgccgccgtccaagccgctgccatgcgggttgcctgtgctatggattgcgctgcgagcacggtcattttggcaatgaaaagacccatctgcttaatcccgtttgtcagcattgtgataaaagaggtgatcttcattgctgtccatgcggttgctgtacgggcagcacttgcgattgattgagcagccattacagtcatattcttgatccataaacccatttgaacaatgccgcgcttcagagcagaaacaaacgctgatattttcatggctgtccacgatgccgccattttcacagcattagctgttgcgcttgctgccatcgttgtatacttcgcaatgaattgacccatcgtgacaattgctgattttaattgggtaatcaatcccacagttctgatccctgaaaccgccgaaccaaagctccgcaaatattgagctgcagtcataaaatctttaagcccatttgtgacagcactgaccgctactatcgctggaacaatagctcttaaagcaccaattaatgaaataccagctgctataaatttcccgattgccgggtttgcctccatcgcagcattagtaaatttcaaaaacccgtttacattctccaaaatcgttttaccgagtggagccatgccaacaagcaagttgatgatagtcttcgcgatctgccccaatgtgctccatactgtagggccgttggttttgatatagtcaatgaacgattgaaattcttttgttttcgtaacgctgcctgcccactcattgaaccgcttggtcagatctacgagtgatgtcatcatgtcttgagacataggagcgaatccagtaaacagctttgtcaggccgcccgaaaagtttctgatgatctgtagcagtttcgggccgttggtttttgtatactccacgaaagcctgaaatttctttgaagaacccaagttcgctgaccatttcacccatgattgggtcattccttcgatggattttgtcatgctctttccggtcggtccgaatgctacgatcagattaaaaactgtccgtaagacattcccggcagatcggccgaatgaagcaaacgccttcggagcttctttgttcagataggaaatgaatctctgcatgtccggagctttaaaagctttgtccatgcttttcgccagtcccacgccctctttcgccagtccgtcaaacattggaatgagtgagttgagagcgagtttaaacgtatttagagacataccgaatgttttcaagatcggcttttgaaccatcgtaccgatgtcccgccagttgtctttaaagtcttcgaggttctttaatgcctctctctcttcttttccaagagatttttgcagattattgatctgtttcatgatcttagcgcgctcttttgcgcttgttgcattgtccagcttctcctgcagcttggaaaggtcttcggatgctttgaatacaccgcttatcgaagtaatagcaagggcgccgaatgccgccgcgcctgttcccgctgttgcaaatgcactggttaaccccattactccgccggctgccaccccgagcataggacccaatgagccgattaccccgacaatacttgcaagggctggcgagattgcagggagtagggacgttagtgccccggcaattgaatgaccgatgactgttgaaactgagtttgtgatcttggcaagtctgttcattgacgtttcaaaccgatcaattcgagcctctatactgatccatactcttctcggtaaggacgccagagcagcacgagccgttgccacagagcgcataagtgcagccgtgtttccgtttatgaccgtggtaattctgtttggcagtgaagccaaagctgaacggactgccgaaaccccgcgcatgataggcgacgtggccgcattaaaagtggtagttacgttatgagatactgatgctatggctgaccgcgcaacagcgacagcacgccctaaaggagtgggatttccgtctatcgtcgttgtgattctgttcgccactgccgatagccctgctttagcgcgtgccaatgcggaagataacggccgcacattccccattaattgcgtggtgacagtttggggaatctgtcttaatctttgcttcgcccaattgatggcccgagttaaagggtctgaatccgcatctaaatcaactcgcgtgcgttgatgtcgatgaacaaagttatctatttgttgcgccgcctgccgtactcttgcctgaaagctggcaatctcggcgtcaacctcgactgtgtgatgatcagccatccggcgcattatatcgttgacacgatccatactgcgattaaattttcttgtctgtgcttcaactattgctgtcagtctttcgatcattccctcaccccattccttgtccgaattttgcaaagtggttgcggattgcatcattaaaccgctgaacccctttggctcgtttgccgagctcgtttacatctgacttgcgccatttgtcgttatcgccagtgatattgcgctccaattgacgtctggccttatccgcatcatacatcttcttttctttggggcgcttctcattcatggcataacggtgaaacatggcgttttttgccataagctccaattcatctatttttcgcaatttggcccctttgagcagaagcttgtattcattaggagtccatgacatgattaaatccacatcataaaccccgagccaatgtgcggagttcgtaattatttggtcatagtcgatcccgttctctctttgtatgcctctttcatcatcttcaagacttccttgccgttctcttcgtcctccagccgtttcgcttccatttccggtgtttcgttcggagccggtttcttccctttgttcatcttctccatcatcttccaacgctgacggattacgcctttgaaaaaacccgccgagtccagcgttgtgaatgcttcattgatcatcttgtcaattgcgtcgcctgtttcgtcttcatcaatgattttaataattgcttcttcaatagcctcagttgatggcttttctttcttcaagtaagcgagtgcacaatcccaaaaagcagaaagataggaagcctcttcgttgagcaagctcatgtaaatattcattgtgccgcctttgcccttttcgtcagcagtggaatatttttcgtttgccaatctgtcaaaagcaaagtcgcagcgtgatttgtattctttatctccgatagttaagtaagccatttataaaacctccgattattgttgtatgttaaaaaaagagcccgggaagcccggaccctataattccttttctgttcgtatcgtaaaattggccgatcgttccgattccccggccgagttcactgccgacacgttaaaaatgtaggcggtatccggcttcaggttaggattcgacgtgtacgaattctttgagacagtcgctatttttgcataaaatctgtaaatgttgtaagatgtcgcccctttcaccgcatcccatgaaaaactcacctgatttgaagtggcgcttttcgcagttatattgcggggtacgttagggcgtaaccgcttgtgtttgcgtaacaatctcggtcattgaggactcgcccgcatcgttcacagcagagacgttgaccgtcagtttcgtgtcggccgcaattcctgtcaaggtgtgggatgtgcctgtgacagttgcgtccagctgcttgctcgctcccctatataccttatatgaagttgccccatctaccgcatcccatttcacggtcacgctgtgagccgtagccgtgaacgatagattttggggcgccttagggcgtagttgtttttttggcattctcgccaaactgcatgaactctttggcacccgcagaagatctgatctcgtcaattaattcttgaggcagaggatcaagttcacctttacgggtcttaccgagaacaggcaatgttgttgaaacctcaataaacccatcttgcggtgcacttttctctaagttctcgatgattgcatgtccatattcagaatcatgcttatcgtttttgtttttattcaggtttactttccatacctgaactgtctcttcgttgtcataagcatcttcaatcgccgtttgacccggatcagagacagcagcataatatgtcagttcgatgctctcagatttagggccgtacccaacaattcggccagactttgttgattcatcttttgtatcttgttctttcgtatgactgccttctgtttggaatgcgataaacagaccttcagttgaagtagcattcatcggttgaacaaagtaaacctcatcaataccattcaataaatctgccattttgttcatcctttcaattgtttattgtgaagcgcattctgagaatgccgtgacgcgtgtacccgtcaatatcggtgatcacctgcatgctgcgcatctcagaacggcataaagaaaagccctctactgttaggggcctgcttgttaacgcttgaagcatgagactcagaatctccatcgcttctttttttccgttgtaacctgaccagcagtgtaaaaccacattgatttcttcaccgctggatgtcttggttttaaatggggatacatcatcatcgcccattgtcacataaggtttttgctgatctttcgggactgcatcaaagacgcccgtgacgcgcccgttcagctcttcgtctgttgataacctcttaaatagagcagcctgcaacggccacagggcagatcgcatgatgacagctcctttctatcacatttgactggcaaaataccgcatgccttcgtccaccgctggattccagaacggctgtgcccgcattccccgcgtgaccacccatctattaagcttggtgtcataataaacccacggcgtttgccggccgccgccttcctctgcgtaaatccctgttccgtattccacatatacggcataatcggcaccaacagaaataacggcccgtaagccgccctcttggtagtcgatttcaattgaatttttcaggttccccccgtctattgcggcggtcggagcattcagaacagcatggctgtaaatcagctcggccgtgtctgtgaccagttgtttaatatcgtctatgacccggtttctgaactcgctcgtggctctttgcatctgcctgacccatctgccgcttacctcagccattgcccttcagcacccccgtaacctgacatttcaaattcataatctcatgcatgccgccctggtcgatcggatctgatttgagagtcagcaccttgttttcgtagatgatccgcattgtcttctcaatatcattgcgatacgggaaatacacattgcaatcaaccggattctgaagctgctgagcctgataatattcccgggacgtaatccccccgacaaaggcctctgttgtgagataatcggtgaatttttcaacatagcccccgccgccgtccggcaccttttccaaccgctgaaacgttatgacgtgcgggaattcctcatatatcatttaactctcagccttcgatatggcgtaaggtgttttgtgatgtaccgaggaaattctgtattgtacgaataggacacatcccccatgcttcttcccgagagtccagaaggattcatgttatattccgcagccttcgcaacaaaaagcttcacgccagctggtaaagcctccggatcgaaagtgttgctacaaaaatcactggcagactcaatcaaaatagggactatttcagacaaatattcgtcatgcctatctgtcttaatctctgtcattcgctttacttgtgcgatgtccactgaatcacctactcttcacctaagacaatcttgatcagttcgtctttaggcgctttagggtcaaaatcatattcattctctttcaagaaagcaataatctcatctttgtttaccttctgcagttgagcctcagtcatatcaagaagatcggcagctggcttctcggcctcttccactctcttaaaaccaatgtgagaataaaccacctcaaaagccttttcagtgcattcaatagttttggaaccgttagatgctttcatatcacgcgccgcctccttccagtgcttttatccgattctctaaatcagaaagctttgctgtcacatcgtcaccgagtttggctaaagtaactgcctttgcaccgatgttggcattttgtacactaccagtgccgatgttacgattttggacagaaccatcaccgatattgatgtttttcacttctccgtcgccgatcatttccgaagtgatagttttaggagcaggcgcagaccccgataacccggtcaccttcgcaccctcttttatttcgagctcgccgccgatcaccaatttgtcgccgttattagtgctatagtttttagatgtgtaccccataagcttacgcctccgttgctggtgtaatagcagcaaaagcatcatcggtcagtgtcatgaatccgacttgctgagttacacggagagcaaccatatctctctcatacaagttgatcgggtttccgtctgcatcgacaatcgttgtcaatgttgcatcctctgagattttgtattccatgccttgagggattccgtaacgtgtgtaattccagtcagccgcaagtaaagccgctttttcgtaatcccatgacttagaatccgcatatccaatcggaaggccaagagcctgctgtgtggcgccgcctgtcgcatcgttgaagatcggaagaccattaccatcctttgtgccgcggagcttttgacggaatcggcgtgttgttgtaaagccgtttacatctttgtctgcgtcttcaacaagagccatgaccccatttaactcatcatatagattgccaagtgagtttaacgcaattgtgttaccagattccttgattttttcaaatacagatacgccttttgcaaacggtgaatctacaccgaataacgcagcctgatcaaatttgatcgcaaaggcttcagcgatagcagggcgcatttgtgtgaagaaatctgttacagagtagcgcaagaattctttagaaacagggatgatgacacccaatttctttgaaatcatttttgctgttaaccattgagccttagaagtttggattctctcaccttctccaacccagtaagctcccggtcctgaagccaagtacgtgaattccttcaccggcttactcatttcttcatattttgctagtttcgtgacagcagattgggtcataaactcttttaaaaccagcgttccttgttcagttggaaccttcccgtttactgagtcttgcattaatgcattgttcggattaaatgttggcattaaagatagccctccttattttctaatacttgcttcagctgcaagcgagctgatgtctaaatcttgatttgtcggttcattgctgccggactggacatcacggccattctcttgaaacttggattcaatagccttttgaagtgcggcattgtacttctcttcgaatgctccgaggttcttcatcgttgattcttcatcctcaccgataaagaattccactacatctgctggcagttgcttttcagaagcataagaaacagctttgtttaaaagcttttcacgttgtgccgctgtcttttgatcttccagctccttttcgagcttcctgatccgcttctgctcttctgtttcttctggataaagctcttttacctttgcatcaaccagagcatcgaggttgttcgccttccacgtatcaagaccttttgtaaagtgagaatccaaccgaggctgaatgagacgttttccttcttctgtatctaagaacccattcaccttgtcagctgacacggcagaaagttcattcagatacgacttaacatcttcgttttctttattttcttcgagaaattttttcacatcttctaaagttggcattacatttcttcctccttcgccctctacagtgcgcgcctgttatgagtgcatgaaaaataagccttttaacgtcatgctcaggacaaaataaaaaacgctgctcggcgactgttatttttcacatgcaaaaagtgatcgtttcagttcacaataaatttcgtcatatccttttttatcttcaaactgggcagcgacgacctgcatttctattaatcgcttgattcgttcgttctcatcatcactcaaataaaaattatctttcactttttgactccccttttttctcaatggatttgtaccactcttcataggtttgatatgggattgtctggccagccccgctaccgccttccctcgcccttctcgtatcaggcaggacgccgttcactttaaacgcaattgtacaacggcagttaatatcatctttggcattattcatgtgccccggagccggcccgactccaccgtaaattgatttgaacagcccattgcgttctattgtcttcccgtccagcttcctgtggccagatcgtgttttaagatccagggtagcgttccacatttttttaagattactccgttcggaggccttctcagcactttccatcctcgccgagacttgtaccctatgagcttctgttctcgccacgtcacgggctttcctgcgggcaaattcggttgctctttcaatgcggcgggtgatctttgaataatcctcccccgcttgtaggccctgcgcgacggaaatttgaatctgccggatataatcgtctctatgccgcctgtatatcgctgacaaagtcaattcagctatgggatttagaatggcctgccggatgacttcggctgtcgggatgctaaaacccaagttaaccacggattccatttcaaatagataagcagaacgcatataattctctaaaaactgcttggctgctaatgcctcaacaatagtcagaatggttttgaaagccttgtgagattcctcggccatcctctccatttccttgttcagacgattgtatttgttggcatcggctaaagtaagctggccgtccttactgtatttcgcatacagccgggcaatttgtgcattgatctcctttaagcgagatgcaaaaacgacatcaattttttgagcatcctcagtgatcatgtcgtccaggtacttatcaatatcattctggttcatcttcatcaccgcccgcgtctgtttccacatccgttaacggcggcatattgagcctgtattcctcttcttcctcttccatcttcttcagctcatactggacatcatcaacaaacgacaacagagacaggcgggtttcttcacttaccattcctttaagctgtcccgtcgtgtttgcttcttccagtacatttgccggaaggtttctcttaaatccaaaccaaacttttttataatcttccgctgccgcttgccttttagtgccccatgcggaaaagatcagtttgtattgataacgcagagcagcagtcattttccgctccatcgtgatgcatttgttttcaagcgacatcaatttatatttcatcgcaacccctgaaacattcccgccaaaagattcatcggagaaattgactgatttcgcaaagcgcagtatattctcttctaacctatcaagatggttttctatgatggcatcgtttatatcctttgtcagatagcttacgtcatctttttcgtcatacaattcaaggactccgctctttttgagctggtcaagcgtctcttcatcagcaccaagcccttttaaaatcagatatgccagccggtattgttcaatctcattcgatgcatcggacaatgtgcggtcatacgcatcaattaacgaaagaaccttttctgcatctccctttaactccttgttatttgctaaaccaaataaggggcagccatcaaaaagatgcaagacctttttatcaaaagtgaaggctgagctgtctttcgtactgaaataatagacatatttctcatcatagaattctgctttggtcttgccgccgtacaccgtgtagtatcgcaaagcgtaagtaggttcatggatgcttccgtcagtaataaaggcgcattcccatggatcaatattttttacacgctcgtttccggagcgatcaacataagcgagacgggcgccgtaaccgcaaatagaagccatcttcccccactcgctgtcttcatcagcaatgttattttccatattaaaatcttcgatcagctgttttacaggtattgcagtgcttgtcgcatcactctcatcaaactcatatgcaatgggatgaccaaacagatagcccacttttgtatcaatgatttcagagtcaaacgagttgttcagccgattgtttactttatgatcaatacgttttaattttcctgtttcaaaatcctcgtattcaatggcttctctggataagatcggaacgccttgaacctcagcctcgtaccgttcataaagctttttcattctgtcatgatctggcttatgttcctgaatgatcttgtcaatcaattcaggcgttatgccggactgctcaatcatgtctataaactgattcatcagctcacccctttccgccttttcggtttattatgcgaatacagagcgtaccggagtgagtccagcacgtcgtcccattccttcacaggatcgccagtcttttgattccaaacatacataaaaatttccttttcgaagcgagcgaccttatctttcacgatgaacaattcatgtcgcttaaacagccgcgccacttcctcgataccggatatgaccgccttatcagcgttcaatgcacgcagtttctccctgcggaaccgctgaacgtgttccggccgcgcagtatcgcagtagaaattgatgttgccgtatcgctctttgatgtccttcgctatcttcacccagtaatcaatttcctcatgttgcttggcatattcttcgagcaaataaaaacacccctggtcatcttgtccgattacaacaatagaacccgggtgctcatatccccagtcaacgcccgcaaaatactttttgaaattgacgcgcctgttttccaattcctcagagctgatatagtgaatatccttattgaaatccttgtatatgactccttcaggcgccacccaataaccgtgtatatcccgatctgtaaacatgccgctcggcgtcgatgccacgatgctctccacatattccggatcgagaaaattgttatcgaacagcgagaaatgaaatgaccggatgttcagccggccgctcttcaatctttgcccgtctttgtcgatataatcggttttgacggtatgcatcgggttttcggggtttgtatccatcatgaccacagcacctttataagagcaccgggaaatgacttcctttacaaatgaatcatgcagggcagtcgcctcattcagaaacgcaccggctgacgtgaatccccgcgcttttttccatgaatttgcgtttgctccgtcaaagcaatatacctgattaccgaatatctcaacggcgcttgacatattgagcttcaattccttcccaagaatctgctctaaatcagtcagaacgttccgcctgatagttcccagattcgcaccgccaatgataaaattcaggcccatattttgatacttactgacgtgagcaagaaacgccaaaaggagcacgaatgtttttcctgccctctttgcaccgctacaaattagaattttgggttgctctttaataaagctgtcccaaacttctttttgctttttattcagttccatcggcgttcaccattttcctcaacattgcggcaatatcattttcttgggtgtttccgtcgccgccgttaacagctttcttcgtcttctcgatattcaagcgcatttgttccaatttgaggcgccgctcatcttgctcatgcgccagctggtcgaactgtttgatcaggctccggagctctcccattgcccgagattgagcgtttaagagagtcgcatgacgatcccaagcgaattgtatttcgaactcttcttcagtggaagttttttcaaaatattcattgccctcttcgtcctcttctggaagataagtgtatttcgcctttttaagctcttttgcaaggtcgtctttatcctgcacaaacataatgcgctgcgcccgaataatagccgcatattgtatctgaatctgatcccatatcatatcagcaggggaacgctcctgaatctcttccatgatttcaagcgtttcttctggcagatactttgagaaaaacccatgcgaaaccgcgtttcgatttctctccggggcgccgccgttgttccccaatgcatttttattaccgggtggggcgcctgccttttttgtgtgcacacttttttcagagggtgcacccttttttcgttcccaaccatgccgctgcttccacgatttaatggtgttcattgacaccccgtatttttcggcaaggtccttgtatttcatgcctttggcgtaatccttatacgcctgaatgtgcttttcagccatctacatccaccgccgcctccttttgaattgagttgttttggagattattttttaggactaaactcgtcatcgtgtgcaagctgatgaatagtgtctttccctatttccacaagtccaacagcctgcaaatatgattctgcgtcgtatacagtcatcgtggtgccgtctttcatgttgaaagtagcgacatagccatctatctcatgaaagttctgttccatccagttaatgagtccgtttgtagggccgggaaagactcttttcactttactcatcgaatcatctccttcatattctctctaaaccaagcccacactcagaggctgtcagccgccaattgtttttctgagatttaccggaatcggtttacaaagaacataaaaaagcgaccctgttgattcacagtgccgcagttaaaattttaaacctgagcatgcttaacgctaagtcttatattgtattcgaaaacgtcaccgtatttttctttatcaatagccggtatcatttcgctagtaaactctatgcatcggccctgttcatgaatttttttcaatcgatcaatggtgaaccctaaatcattatgagccttggagaattgttcaaccttttcagtagtgatacagtcgaataactccttatcagcgactgccccggataccagttgatttatttgatttatgtttaattggggtatttttgcattgtgcaaatgaccagtaatcctcacgttctctaaatcagtttcttgtttcgatgtttcagaattcatcttactcactcctttcgttagtgaattgcgaacaaaagcgctcttcataaataggtggcaaccgtaagacgaaaaaacacccttttgacagggtgctcatttccgcctatgtttttggaaatccaaaatatcctctttcagaaaaagcctgtcccggggcatttctttcatcggctccagttccccggtcttcactaactggttcagatactgacgggtgaaccccaatatctcaagcgcttcacttgtattgagtatctcttcattcaagaatttcttgattgcgtcacgctctttaggcttgtacatttttgaatcatccttttttctcgcgatatttcaagtaaagggaaaatgctttctcgatgatcgaaacaacaaataaaatgatcaggctaatgtcgagagccgttttcaatggtcccgctgccacatcctgacggaaaaacagcatatacgccagggcgagaagaacaacaatatcggtggtggactgtacacttttcatttttttgaaagtggctggctttcaagtatttttctttagtcgccgcatttgctatacttggagcaagggagaagcgctaccttctccctcggctcaaaatcatctgcgctttcttggacgtctgcgttttttgattttgggcttttttgttttaagcttttccctgatgatgaggactttctcaacaactgtgagagttgtgaggataatccccagtaccaatgcgatttcagccactttctttccctcctttctatactttaattatacctcgtttatttactcacgtcaagtaatttaatggacttttttcattatatctccaataaaaaagagcctattcacgctaaacagaataggctgtgatctgctctatttttcattttcaggcgggaacgttcgatgttcttctgcacggttccttttttaatccccaatatctgcgctatctcttcgaatgacatgttttgcacagcgtgcatcatgaaaatgtctttttctctttcggtaagcacggatagggcatcagcgattctttccttatcccaatcacttacctctccctcagcctcttgaacgattgcgtattcttccggcagcgcatcaattaagcgcggatcagcaagaatcgtcctttgatatgcgtctcttctgtcagcacctcggcgagcgcccggctgtcttccgttctgcagccattcaagagtgaattcaatgtcactgatcatactactgataatctttttgtcgttgatctgttcagccgtcagattgacttcagctgtatctttgtagagccgatacatttttcttgtttctcttaaagctcgtttgtactcaatgattaaatcttgcattctgattcctccccttatttgcgcttaaatgcgccgcccttgcctcgtttaagtctttgcatgtcttgtcccatcatttgctgccaaaagcgttcagatcgctcctgcgtgtttttattgggctttttctttttctgcttcatgtcatccctccgctcaaataaaaaacggacaccaatcagagcacagtgattctgtgcaatgatcagtgtccgcaggctttccgtcttggacttattcagttagattcgttcttattcttctctatatacttatcaatatcttgaaaaaacgccgcggccgtgaatgcgagaattgcgcctattaacgtgatgtttgctttcatgtccggcctgtattcgtactgaaaataaaaccagaatcctaaccccatcagcagaaaaactattctcagcgccatcgaatcccccttatttgatttggaattttgctgattcaaatgttccgatatagttccgtttgccggaatcagagtagcagtccagctggatgacataggttccctttccggtcttattccggatcgttttcacgttgaatgatttcagaggcgttgccgttttgaagctgccccgctgtaccagattcgtatcagtcaacccgccaccgctgcgcttcttgtatacgccagccgtgtaataaagagttcttgagccttttttctcggctttccagtccaccgttgaggcgccggccgtgtatgtcgcggcatccgtaaacacccgtccgctgtacccggattcattttgccagccggaccatgcggcggaagcagacggcgcaacggccgcggctcccgtaagtaatactgctgatagaatgattgatttgaatagttttttcattatttcatttcctccactccgagaatctctttcatgtattcgactgtcttaccgatctcaaaccaactgccgtctgccaattcgagccgggaaccgccgggaatttcattgatggctgctatatcctttttatcaaatgcgcacaggattttatcccctcgccagatttttatttctttgttcttattcctgtttgcgatagattcatgaacggatttcataaagcagtcagagcaagtgcctccaccaaactgttcaagccgctttccacattcacaatgcattaagtcattttcggctcctgtcattccgtcacccccaaaaatgatttgcagcactcgcgatgccatacacgacccaagagagggcgaaaaacaggattcgccagttctgcccccggatcattttgttttgctcctgaatcgtccgcgctaaatcttcgttacgcgtttccagttcgatgcaccttgcttgcagttcttcgttttctgtcattgttccatgccatccttcacgttataccccttcaaaatcgccttatttagatcatatgcagacatgctgttcagcggatcaaacaatccggtccacggttcgacatcacctattttaatgacaaagtgtttcccgacaaattgaaggcgcgcaaattcttttttatctcctttagtcaacgcgttaactctttcgggttcatcgtcagccatttttaaataaaacttcataccttccttaatcgcccgcgcctgttcctgtgtgacctcaaccttatcgcttgttttgattgtgatttttgtctttgtcattccgcgccctcctattcctatgatcttagttttgtcttatttatcatgattgtcatgcaccgcagtatgaaaaagggaagtctgatctagcccggtgcgataaagaaatccagcgtagcgttttgtcttaaatccgactttctgaagcaaccaacaaggaaaagaaatagttgacgatagcccaatcaataaaattaacaaaatgcctgttttcgaatctagtttgaatccccacataaaataaatccttcccttcatccttatctcccatcactccgcgccctccttcatcgtctcttccagtaaacttaaatcatcagaatctatcgcaagagtttgttctccacaaaaagggcaataaatttcggacgtgctggcaggcctttctaagaatgtccattcctcgcagtcgtcgcaatggtatccgatcaatgttccattcacttttggcattccgtgtccaccttcttccgccgcatcgaattcacaagtatttgaatctctttcgtgagccgctcggcctcttttgcgccttgatctatcacattgagtctgtttcgctttctgtaaatcaccgcgtcatgcatgacgttgttaacctgttcgctcaattcatcaaacagattgaaaagttgaatggatttatctttgtatgccatcactccgcgccctcctttttaagattaaaacctaataaaaatgccgtggagtaaatcgtttgagctgaattaaggttcatatagtaatcgcccatatcttctattgattcggaagcaggccgtttatttttcaaatcgttatatgtcgcttgtagtatctcttcttttctgtctaaattctgaatagccgcttccagatagactgcctggtcaagagtttcttcaagtgcgtgctgcaaccagccgcgtatgtcatagacgttaacttggacggggcggccgtacttggcaagccccttttcctgttgtgcgtttagtttgctgatgacggctgaaatgatcgggttgtcagcgtggttcatcaatacccctcctgctgccgctgatgattgatggcgtttttgtccatgtaagccgcttcgatttgctcccatttaaaaccgagcttgctgcctaattcaaagaaagtcgtaaataaactgatatatgtccgcttttctacattgctgaaatggaatccgtaagcaatggatagcaagcaagagaatgtttttgctgtaccaaaccctttttcagaaattaaatgctgcgcgactacatcatctatggtgtcagtgtcattccagcctagccggttcccgatgctcaagataaaatgcaggcagtccacgtattcctcaagtagtgggtttttatcacgaaaagccgttacatcacccacgttacaaacaggacatatttcataatccggatctattaagtgtttaaaatcatctttgtttaaattttctccgcaatagtgattttcacatcggaaaaaggctgcgttttcaggattcgcaccaacatttgttgatacttttgttcttggcttttggttattactccaatgcttaaagccgcgccattcattcgcacactcggcaagttccacctgtagagcaagaatgaggtttggcagcaggtcctgcccctcaagccccttttctttgatgatccgatcatcaagcgccttttgcatttcaaacattttttgtagattcatgattcaactttctcccttctccgtttacgcggaatgcctatttttcttgcatgatagaaataagtatcaatacattcgaaaccgaaatgctgtgctatttggaagtgggcccaattctggttacgaagctccgtccattcttccagagtgaacaggcgatacggtttctggattactatcccgttagcctttttccagacagaaagagtggatggagagcaatgcagttcctctctcgctatttccgtgtcagacataccgcgttcatgaagctctcgatattgctcctctgtgaagccgatgtcatcaagtaaagtcacactatttcctcctcagcacccatgcagcgcccacaatgcgggcagcgtgcatccgggcggatttctaaatcaagttttttataatcgcagtccgggcaatggtattcgatcaccccgtcaccccatcaatcccggcagtatggagacagcgaagaagaaaagccccacgcatgccccgaccagccagatatttgttttatcccgtttagcgataatggtatcgccgatcattttcagatcgtcagaccgagcgacaagcgtcgggatgtagtccgggtgaacctttaaaagctcggccgcctgctcgacggtcattgcttcgtccttcgtggccttcacgttccgttgcagttctacttgtaatggcatcatttttcttccccctcgcaatggcattcactttcttcatgaccgcattcttcgcatattttttcaacctgccaaccctcaaagtgatatttgggcattgaataatattctttataacaactcgtgcatgttacgatcccgtcgctgtctgaatcccagttagaatggtatgcttcttctgtgcaatcgcaatacggacaagtttgttcttgggataattcgctcattccgcatcacctgcaatctgcagatttttataatgagctatatgtccgcagggattttcccaagtatgaacttggccgaaaaatccgtcctcagcgtgctgcgtgagctgaggatttcccatttccccgccacaagtagggcattcccaaagtgcattaacttccttgaacccgatcaggaaaccattggtatcgcgggcgggaatcgttacttttcttgtcttcattccgcagccccctccaatgcttttctggccgtttgccctccgtcgagttcgacagctggtggacagtcttcaaattcgtttgtatacgtcgtttcattagcgtaaaattctaatgcgtttctataacgcttgttctccgcctgcagcaacttaatatcttcctgagcctgccgaaactgattgaccgttacttcctgctggcgttggtgttcctcaatgattgcctgctgttttctcatgtagccgatcattatgtctttgacataactctgctcgatgatatagcaaggtcctgcatttatatcgagtggcttcaattcctcttttgaagctaagtgccacaatgacaagtcgcttataatttcctgtaatttatccatgcccgttcctcccccgcaggggaaacccctgctatttgaatttgtggccgatctcgtaatcacaacgagccaggccgccttttattgtttgaatgattgttttaccgtgttccggggcatccattaagtgggctgtcccttcagtaccatctaaaacgatgatccggactttccccggctcgatgctttgctgaatagttgtttcgtgattttttatttctgttggcttgttcactctggccgccccctgtgctatgatagaagtaccagttcatatcagagcatcggggccacggcttcggtgcttttttacgttttacgacggcagccgcatcgttacgccagcagatggttttaattcctcgcggtaaatgatcggatgcttttcgacgtatgctgccaactgctccggcgtcattttccactctttaactggaccaggcttgtatggattgattttttcttgcatagcgataacctcctgaattaattttgggtatttctgaacctccaagctttttacaatccgctcccatgcggctggcgcatcgtttgcaatcggaacagagcgtcatgcaggccataagcttatcttcttcctgcacccacaacggccgatcgtctgcgattaccacgttttgcagtggttttccccgcctttcttttgagttttttcagctcgtccagctcaatgaagccgagtgccttatccagcgccagcaccttgagtggcgtctcgtaaagacgctcgtacaacttacgtttgatggcaaattccgttgtttccacgcccttgatgtcaatgatctcgatgctaccgtccaagttatgaacctcaaagtctgcaatatattcaatcttccgaaaagttttgccgttctttttgaatgcctcttgaagcaggaaccgcggctgcagcttaaaatctttgatctgcttgctcatcttgagccatttcagctgttcatagtatttggcttcagcccggctatcgaacgtgatgccgtccacctgtgtttttctggcgccgtacttatttgctggcatgtgatgcctcctgaacagccgcggtgattgtttgttttgtttggataatcaacgcttttaattcttcgaagttgttcgcctgccccgtcaagatttccatgtttagaattcgattacacgcagactctaaatctttgaaatacccaacaggcttgtacccgacctcgccagacggattgccctctttatcctgcttttgaaatttgatgttcaagataacgttcattggatcagatgtaattctgtatttaccgatgtctaaattcattccgccgctcccctctctttcaatgtgcatgcctctaactcttgaccgttgtattttaaaaactgtgttatgactcttttttcttcttccgatagcgcactataaaataatagggctgctaatttgaaattaattggcggatagatttcacctgtataagggatttggtttagttctctcattctgccgcctccatatctctgactatttccttatcggcccgttcccgcgtgccgtcgttacctcccgtcaatttgttcccagtgctgaatctgcttttccttgtacggcgccgtgaggatgatggccggcagcaggatcaccgctttaagcactgtgcatcagctccatttgtttgattttttcctcaagcacccggatagccggggtaaggtcctggccggccgtttgctcggcgggcccgaacagatacataccgccggttgctgtgaagttcgctttttccgtcattcccaatctcctaacctatgatttaattgcatccggtcgcccttaatgatcaccgtataatctctgcacatttgatgaatccgggagcccagcgcctcgtcaatatccaaaagttcacccgtgtcgagttcggaagagattagcagaggcttgtgattcaagtaccggtaattcacaaccgattgaatttgctcaatctgccattcggtagcacgaggctttttgattcgcccctccatggtcgttgcaaaaactggcttgaataaatcatcaatgaacagaacctcagcttttcgcatggcatcgagctttgtttccagttgatcaaagtcacttcgcagatcgcccattccctcaacgtacgggaaatacatgcagtaaattgattttttcttgatcagattgttcatgatcgccgttaacaggtgcgttttaccgctccccggttgcccgagcaaagcgatactgtttgaacgttttcccttgatgctctgaaaatccttatagtattccaccgcgcactcataagcgtccttgatcatatccggcttcccgtccttaatgaagtttccaaaaaggagcttttcgaattcttccgtgatgccgctggccttcataagccgggcgatctttttccgttttacacactcgcattgctttgaaaatgtggttttccattcccgggccttatccggcaagcatactttccccgcaagataatcctcttctctgaccatttgatcaggggccaggctttccattgtcttatgctcttttctcaattggcgctctgtgtcttggtgaatccggtaaacgataatgcccttatccttgcagtcagaacactcatattcagccttttcttctgaggcggcctgtcccgctgaagatgctgctgaccgatcccgaagcttggttagaattgccttcattgccgcgtccatatcttgcgttttgcgagcttccatactgctgtttctcctttcgtctctggctgaatgggtttgagaggattgcttcaatgtaattcagattgacgttgtttcccttgcttctgaaagcctgtttcattgcctccatgactttctcttcgccgtaatcatccaccatatatccgagccgctgaacctccatcgtgccaattgtgcgggctgttttgttttcgaatagttcaaatgcgtttttcattttttcgtcaacctcctgctgtgttcttggcgatgattcttctttcggcaatactacgtctggcgtatccgctttaccgttctccgtttcctcattacgtactggattttcaaaagagattagcttgtatttcccggcctttctcccctgcggctcatattctatccgtttgagctcgatcagaattttccggtgctttatcaacgtgttttctgttatctcgatttttgcttgaagagtggtatttgaagtggtgaaccactcccgccacccggttttattgttgatgtgcatcagatggaaccataacgcttgtgttgttgcagacaacggattcgtttctaaccaattcatgaagccgttcatttctttcaggtagttcatggctcacctacttcctttcacacagtgctgtcatgccgctgatgcggactaaacgtaagccaggttcatttgttcttaggtagccttcgacataatcacggaacagttgggcacgatttggggccccttccgtcatccacttgtaacagaaagggatgccaaccttaatcaaatggcaggtcattttcactaatgtcaacaggcttaccgtcaaaaggatcagcattctgcgcgcttggcttttcttccgacgcttcggcatcaatgatttctgcatctgccatttcgtcagtaatgtcgatccgttcacgttcctcgtcatcctcaatgactgccttctgcatttccacagaaagtatgccccacttgctcaaaatagctttcaaaactgttttcagtgccatagcatcccaatcgtttttccatccaaaatctgatttactgaatttctttttatgcttctcgacctgagcttttgtccagtagacagtttttcgaaaaccgtttagcagttcaaagtatgcagcgtaccctatcacgtcctcagacgtacgttgttcaaaatcaatttcaatttcttccgtcagtgggttccatttctgaagctccccttcatgaatagcaatgcagttgatagatttgtattggcctgttcgcaatgccagctgaatataccctttgtatccgagctggaactgtgctttgccgccatacggaactatccacgcataacccaagtttttatcaaccggaagatcaagcgtagccgccaccatcgccgatgaaattacgctcataggctctgccttttggagcattttttcgccgttgtaaaggctcagaattgatgctgtgaactgtggcgcccttttacctaaaacctcctcaaaccggcccatgaccgctggagaagaaagcagtccctttatcgttgttccttgctgttgtgctggagaactgttttgtttcttctgaatgctgtttttaagcgattgatttgtagccatgtttagctaacctccttaattccgaagcgtctgtactgcacttcttttgtgactttctcatatacatctggaaactgctcttttagtatcttgctgtcgatccggttcgttgaaactgacttccagcttgtttgataatttccgatgaagccatattctgcttccttcatttcatgtttgatctggttttctaattcctttgcctgcaatgtaagctcgttgatctgttctttaagctgcaaatactgctgaatgcgtgttttattagcagatgtgagatcaacaaccttaccgccctcagcctcggaataacgttgcttgagatattcttctgcagcactcgaaccgtcaagagctggcgcctttccgcccaagaccttttcattccagaattcaacctccgcttgaaagatcatcgcaatgagctcgtcatcgcgctcaatctctttccaaacgaatttattaccgccgataagcacagcgaaatatgcttttttatactcgggaccaagaacaccaagataatgctgaacctgaacaatatagctgtcaggaatctcgttatcttcccattctttcaggttatatgctgacgtggttttgcactccaatatggctttttcgcctacaatcattcggtcaacattcgctaaaatgaagtcatattcaggatgtttgagcatggactttttacgcctaacctttttcccgctccgcacctcaaattcttttgcaacaatatcttcaagaagagaaccgaagtatgcagcttcactgcctgattcgctcacaggcacctgtccagttttgtctaaccataattcaaacggcgtttgccatttgtttatgcctaagattacggaagcatctgaaccgccgattcccttccgtcgctcaagaagccattcgtcccgactcatgtccgctgtcgaagcgaaaacctctgcttgcatcagatcagccccacctttcttttgtaagcctccgcgccaagccgctgccattcccggtagtgatccattgaagggaaactaaactgcgctttaccgtttttggcgaatacaattgaaccgcctacctgccttaaacgttgctgatcctcagcgcgctcgctgaatgccactttaactgctcttgtcatcgctgatccccctccgctaaaattctttctccttccctttccaaataagctctgccatcataagtaagtgaaacagctaaaatctgttcttttggaggttcaggcgattttatacctgttaatctttcaaattcataaccttcaaaacactttataaaggctggatcaaactcctgtatttctttaaatctctctttctcttggtgactcatagcaatgtataaatcaatttcattagcatcacgcattaatttgatgtgctcactcgtcaatttcatatccaacaaacctccattgttttttatggggcgttttggtataataggaatacaatcaatttccaaaacgccttacctagtccactctgccaagtgggcttttttattgtgctgaatgaaacctaaaccccagttgctccttcaaatagcgtttaagattgtcttgtaaaatcacctcgccgctgtcgattacataattatctgctgacgttacttcatccccgaaaaagtccttttttgtttccggctcagtcgccttgtcatgccagttgttcagaatcatcgggttttctatgttcaatttcctcagctccttcgtttacctttgccaattcagcaagactctcgattgcattctctaaagagtagaattccttatgcagaatgctcacagctcctttgatctcttcctctgaatatttcgccttttgggcatgtcgcaagaagcttgccgcgagctcaaattttctgagattcatcccatacacctacttatcactgccagattaataccgcgctgttgcatttttattgctgtatgatacaacctccctttattcgcaagtcggctgatgtcctctgtaagaaccttgatgctccctgcaagacttatagcttcttcataatcgccgtcccgtaatgcctccgagagcatgatagagagctcttctgccgactcgatttttctttttgctgaatctgcatctgatttaagaaactgattgattttcataccagcaccgcctgcctttcttctgttttcgccattgcaacctgactcattagcgctttccgcgtccacctttcggccagttccttcatgttcaatccatgactacgggccagcgaatatatcagcgttttatttgccgggatcagatcaaaaatctgtttaatatcggccattggcagttcttcaggttgtcggcctggcctatcgtttgccagccagcgcgctaaatgccttgttgcttgcaatgcttcttcaagctgatggatcatgttaattaccgccgcgcttgcgctctcgttaagagccgggtcaattggcgccgccgtcgtcgggtgcaatttgaagaggtaatgtaccagatcaatatgttcgtatgcctcgcacgcctcaaaccacttaatgcataattccggggtaagcttactgaatccattttcaacgtccgaaacataccgctgatccttcccccctatcaaattaccgatctgatattgtgcaagtcctgccgctttgcggacactacgcatgatccggggtagattatgcaaattgtatgggttgttctccatatgtttgcctcctgatatatccagttgttcactggtaaaatttaattaatgaaggaactagcttgcttgctgttttctcagcttgtcgatgataaaggcctgtccctttggcgtaatgcggatagtcagccatgatttagattgaccgtttacttgtcgcactccctgtgctatctcaaaataaccacggtcgatatattcctggtatggctcgttcttgtttgccaagatcatcttccactcgcgtagcttttggaacagccgtttttctccgatgctgataccctttttagaagcaagcttcgccagttccctcacaagcaatgatttttcagatgccatacaactctctgcaaagttgataagtggctgctgaatctgcagtgtgtgctgaagtcgttgccgctcttcctcttcggtgatccatcgctttgcccggctgatcggatcatcaatcatgtaagagggttgattgagcctttgaagctcattttccatacggttaaattctgcaatgtatttttctttaaatattgcggcctttgcgcctgtgtaaccaaaaaccaaaaatgtgagtccatcacgttttataagatatttttggtatgttcggtttctgtcatcctgataatcaacctccgcaaaattgtggagattaaattcttggctggaatcaaggtttctgatgtctcgcaggaccgtgtcatgccgtttcccaaagacttcagcgacagtcaggctgtccgttacaacttgattgccttcgatgaaaaccaattgactcatgctgtagcccctttcttgtagtagtcagtgttttcggcaacccaatctgtgtttttctcgatccacttgaaaagcaagtgagtcggtattcttaacccggcttctttaaaaacaggaaagtcagcacggttgataagttgagaggccttcgtttctttgattttcataacctccataaactcttgctttgtcagcattggcgggagttgagtggttctgaaatcctgaagagctccagcgacctcttccgctatgatttcgcggaacatgtttctaaaagcttcatggtctaaattgaacatgcttttaacctcctatgctgtgttgaatttgagttcattactcgaaacgcgtagttcctcgtcaaaaaaaagggtccaatggaatccaagaacctgtgcgatagccttagccgttgggacaccagcatttctttcgccttgctcaatagatgcgtatgttgttcttgcgatgcccgctctatcagcaacttgtttttgggtaagattttgggataatcgtatttgctttaaccaatcccttacaattgcaggcatgtttttcacctccatgactcatttcgtgtcgttgagttaaatatactacgcaaaacgagtcttgtaaacccctttttttaaaaaaatgactcttttcgagtaatctatacatactacgcttattgtgtagttataatgtaggtagttctaaaaacgtgatgaggcgatactatgaatttttcatttagacttaaagagctccgagtagggagaaaattaaatcagcaagaggttgcagataatttaggcattgcccgcacaacatacgcatcatacgaacagggcaaaagagagccggaccatgagacgcttgttaaaattgcggatttctttgatgtttctatagattttttgctcagaggcgaagatcattatagagataaggccagagaactccgtaaacataatgacgttcgttttgccgctgtcgatggtcgggaattcactgatagtgaaaaagaggaaattctcgcagatgctttaagacgaattgatggcattgaaaaactcattgaggagaatttcaaaaagaagaacgaagataagaattaattatttatttattattgttttgtttagtttaaataatgctgaatagatcacctcaaaaattgaggttaagtgttcagttgaatggcgttcaacctcaaaaattgaggcgaacacttcagcaataccttcagtcatttccctttcaaccgcaattattgaggcaatactttcagccttttttatgttttcctatgaaaatactagaagaaatggtaaaactctcttgaattattaatcgttttagttgatcatatataggtattctattatatgaactgggggaattagtttgaaaaagtggttagttttattcatgtctttgggcttggctcttgcattagcagcgtgtggatcgtctgaaaacgcctcctctgacaacaacggggaaagcaaaaatgagaaagccgaaaagaaatcctctgataaagaggttaaaatgggccaagatattaaggttggcgatatgatttataatatcaagtccagaaaagcagctgatcaagtaggcccgtctgtactgccggagaaagcaaatgacaaatacctggtcattgaagcaacgcttaaaaatactggtaacgataaaatcactgtggatgcctctttcttcaaattgaaaaaaggcaaaaaaacatatgaagccgattccgcggcgagtgtttcagcgaaccaaaaagaagacggcagcatcgacaacagttttctcatgcaggatttaaaccctgattctacaatgagtggtaaagttgtttttgatgtggcgccggaggttgcgaatgcaaaagacctaaagcttgttgtccaaactggcatttacggcacacaaaaaggtacaatatcactaaagtaagccttcgggcttcctttttttgaatacaaaacagaacaaacgttctttataatgccactataacctatttatggacgcatttaccggtgtaaaatggtacatttttcccctataattacatacaagtaaacagattttccacaatttaagcattgacaaggtaatgagggggtcaattacaacatggggtatacgcaaagtcacttagaggattggatcgaaagttttctcagggaacacaaaataacaacgccttcagaacttaaacttgttaaattatgcaggaagctcaatgtatttgtactttttgatgatcgagaaagttatatgttagatattgcgggggttcatatcgtaggcataaataaccggttaagctatcaacagcaacgatcggatttagctcacgagttatggcacatcttattagagggcggcgataacgagcttatgccgccacactggagacagtatcaagaatcaaaagcaggttatttttcatatcacttttgtgttccaacattcatgctgcggcaactgaacttaccttcagatgaggaagccgctgcacggttggtatcggatacattcaaggtgacttttgattttgcaaaaaagagattaagaatttactttaataaattaaactatcgttaaggaggattaaaatggttgtctttaaaaaggagaaatcaaagcgttcatccaaggggtatacttggtatttcgtaatggaaaacggccgcgatccaagaacaggaaaacgcagacaaataaaaagacgtggtttccaatcaaaagcatcggcagaagccgcttatcttgaattgaaaacgaagctcatttcagggattgatgtcgggaaagagaacattctttttcaggaaatcaaagacctatggtacaaggaatacaagcataccgtcaaagtcagtaccctgcgagcacgaaaaagtgaaatagagagtttggaagaatacttcggaaagatgaaaattaaagatataaccaggggtgtttatcagaagtttttagattatctgagggaggaaaattattccttcaacacaataagtggtatccacactacagcaagtatgatcttcaaatatgcgagacaggaggatatcataagcaaaagcccgacggaatttgttaaaccgcagcgtccaaagcttacagtagaagatattgaatctcaagaagaagtcgaaaactttcttgaaggagaagaacttgttgagtttttagaccttacagaaaaacacggcctttttctcgactttgaatatttctgtatggctgcatttacaggcactcgttccggtgagcgattggccggcaaatggagagacttaactttagagggagacgacctcaaaacatttcgagttaccaaaacgctttattgcccatcaaacaaagcatctgactatgaactgttgccaccgaaaacgccagctgctgttagagatgtacctttgtcggactttttagcatctttgttgaaaagactgaagctcaaacaagctaaaatagcatatgcgaacgggcgaacattcagtgacgatgatttcatattcgctcgtcctgacggccaccctgagaatattaaaaagatggataccagaatgagaaggattttaaaacggatgaacctaaacaaacatattacccagcatacttttaggcacacattcacttcgcttgctgctgaagcagatgtacctttagaagagatacaaaaaatattaggccatcaaaatgatgacataacgaaaaaagtctatttacacactactagaaaaaccaaagaaagaacttcgcaaaaattcaattcattcataggtgacctctcaatgaaaatacagttatcatgactcctatgtgaccaaaatgtgaccaatttcataaaacaaaaagaaaaaccccttgaaatcaaggggtttcggcactctttacatcatgccacccataccgcccatgccgcccatgtcaggcattcctgcgccgccggcgttttcttccggtttgtcagcgacaacggcttcagttgtcaggagcattgctgctacagaagctgcgttttgcagagcagaacgcgtcacttttgtcgggtcaacgatacctttttcgatcatgtttacccattcgccagttgcagcgttgaaacctacgccgattttttcgtttttcaggcgctcaacgatgacagatccttcaagaccagcattgtgcgcgatttgacggatcggctcttcaagcgcgcgaagcacgatgttgatacctgtttgcgcatcgccttcagcttccactgcagcgactttgttgtatacgttgactagcgctgtaccgccgccggacacgatgccttcttcaacagctgcgcgagttgagttgagggcgtcttcgatgcgaagtttacgctctttcagctcagtttcagtcgcagcgccgactttgatgacagctacgccgccggcaagtttcgcaagacgctcttgtaatttttctctgtcgaattcagaagttgtttcttccacttgagcgcggatttggttgacgcgtgcagcgattttttcagtgtcgccggcgccttctacgattgttgtgttttctttcgttaccacaactttagaagcgcgtcccaattgtccgatttcagtagatttcaggtcaaggcctaagtcttctgtgattacttctccgcctgtaagaacagagatgtcttcaagcattgctttacggcggtcaccgaagccaggagctttaacggcaacagcgttgaatgtgccgcgaagtttgttgacaacgagtgtagcaagagcttcaccttcaacatcttcagcgatcagaagcaatggtttgccttgctgtacaacttgctcaagcacaggaaggatttcttgaatgtttgtgatttttttgtctgtgattaagatgtaaggattgtcaagaaccgcttccatcttatcagagtcagtcaccatgtaaggagacgcatatccgcggtcgaattgcataccttcaacaacttcaagctcagttgtgaatcctttagactcttcgattgtgatgaccccgtcgtttcctacgcgctccattgcttcagcgataaggcttccgacttcctcatcagcagcagagatcgcagcaacctgagcgatagactctttgccttcgatcggcttagaaatttcttttaagttttcgattgctacagtcacggcttgttccatacctttacgcacgccgacagggttagcccccgcagttacgtttttcaagccttcgcggatcatagcctgcgcaagtacagtcgcagtcgtcgtaccgtcaccggcaacgtcgtttgttttgctggctacttcagctacaagcttcgcacccatgttttcaaacgcatcttcaagttcaatttcttttgcgattgtcacaccgtcatttgtaattaacggagaaccgaattttttctccagaaccacgttgcgtccttttggccctaaagttacttttacagcgtcagcaagcgcatcgacaccgcgaagcatagcgcggcgtgcttcttcactaaacttaatatcttttgccatgttaacgaaacctcctcgaatttttaaaaatatttatttgcttagccgataacagctaaaatgtcgctttcacgtaagattaagtattcagtaccttcgtatttcacttcagtaccggcgtattttgagaagataatgcggtcgccctcttttacttctaaagcaacgcgctctccgctttccaacacgcgacctgaaccggctgccacgattttgccttcttgcggcttttcttttgcagaatccggtaatacgattccgctggcagttttttcttcagattctacgagttcaatgacaacgcgatcacctaatggctttaacaatgtaataacctcctcaatagtatgaatatgtaattttagcactcagctctaaagagtgctaacacagttattataataaagaatctcacttccaatttcaagtcataagaataaaaaattttcacgcttacatgattctctctcacactgattttcttcttttttcacgtcaagttcacttgtgttacaataagaacaaataagttgattttataggataaaggagtacatatcatttgagaaaacagtattggtatatcattttgacatatgttatcatgcagctttccgcattgatcggcattcctttaatgtacaaattcggctatgcgggcgggcaccctacgaatgcgaatctcaccatggctcaggggatttattccgtcgtaagcttttttatctgcctgattatcgttctcttgattttgagaaccgcgccgaagcagacattaagaaacgggaagaaagcatccgccggcatgtccgttctctgggcggtcgcgggaatatggctcgctttattttctcagggaatcgccgggatgattgagcagtatgtctttcatgtgggcagcggttccgaaaacacgaaagccattcttaacattattaaagccatgccgctcatgattatcgtttcttctatcgtcgggccgattcttgaagaaatcattttccggaagatcattttcggtgtattatatgaaaaaacgaatttctttatcgccggactgatcagttccgtcattttcggcattgtgcaccaagacctcacgcacctgctgctgtatacggccatgggctttacctttgcgttcttgtatgtgcagacgaaacggattattgtgccgatattcgcccatgtcatgatgaataccattgtcgtggtcatgcagctcggccccgcccaaaaatatattgaacagcatagtgagcaaatgcaattaattactggaggattgtttgtatgaggaacccaatgacttggggcttgatttatttcgcagtcggctgtatctttacgtatttggccgcaagctctccgggaagcatgtggtctttttattccatactgctgatggttttcgccgcttataatatcagcatctcgtttaaaatgttcgccttctcatttaaagtgaagaaaaatcaaaaataataaaagaaaagccatttctcatcattgagaaatggctttttttatgctgatacgtcctggtcagattcactgccgatctgccttttccgatacgccgcttttgaaatcaggatactgatctcgtataaaatgcaaagcggaatggtaatcatcaagtgagacagcagctcaggcggcgcaatcatcgcggcgatcacgagcagcacaaaatatgcgtacttcctgatcttcgataaaaacatcggcgtgataacaccgagtctcgttaaaaacatgatcagcaccggcatctgaaacagcagcccgaacggaatcgtcagctgcagcagaaaatgaaagtattcggtgatcccgatcacctggttgacatccaggtcattcgagacccgcttcataaaatcaacgaccagcggaaataaaatataataagaaaacgacacaccgccgacaaacagcacgatcgaaatcggaatatagctgagtgttactttgcgctccttctcatacagacccgggctgacaaacgcccaaatctgatagagaataatcggcgaagtcaaaatgatgccgatgataaacgcgaactgcaaaaagataaacagcggatccgtcaggttaaaagcattaagggtgagctcttttacttcatcggctttttgaagatacacaatgataggttttgccagaaaaaagccggcaataaagaaaaccgtaaaggataacgccacaatcagcaatcgtttccgaagttcggcaatatgctccacaagcgtcatttgattcactctcatacgcgtcatcctatcttactgttcttctttctttttttcctcttcttcaccggctaatcccttagtagcgttcttaaattcacgaagcgtgtcccccgccgcttttcctaattcgggaagcttcttcggaccgaaaataatcaccgccaccacaccgataaccgccaggcttccaggaccgatcatgtgcagctcctcctttcgctattcaatttcttccaaaacagaataatgctttaagaaataaaccaatgattgaagctccacagctaaatctatatgatgaattcgaatgtgatccggcacattcaaacgggccggcgtaaagttaaggattcccttgattccgagcgccacgagccggtcggtgattgactgggcggcaaccgccggaacggtaagaatcgccacgggttcatcctttatgtgaagctctaaatcatcaagatcaaagacaggcacaccgcctacctcagttcctattttactctgatttacatcaaaagccatagatatttttgtgttattattttttgtgaaattatagtgaagaaacgccgtccctaaatttcctacaccgatcaaaatgacgttcgtcgtttcatcctgatccagtgtttttctgaaaaatgacagcaggtaatccacattatagccgtatccttttttaccgagcgccccgaaataggaaaaatcccggcggatcgtggccgaatcgacttttaccgcgtcgctcagttcagctgatgaaacgcgctgctttcctgacgcgtgtaaattctttaaaaagcgataataaagcggcagccgttttgccgtcgcctgtggaatttttgattgatccttgttcatgattggtcctccactttatactcagatgcatctcttttaaaatcaccgtttttgcctcctgttttttccatgaggcaggtcgggccgatgaccattcctttatccagcgccttgcacatgtcatacacggtcaaagcgcagactgaagcggaagttagcgcttccatttccacacctgtactccctttcgtttttacgcttgcctgtatatgaagaacggcttcggaatccttttcctcccagccgaatgaaatgtcgacgctgcttaaagaaagcgggtggcacatcgggataatcgctgacgtctgctttgcggccataattcctgccacctgtgcgacagccagcacgtctccttttccgatctcgcggtttttgattctgctgtacacgtcatgcttcatgtgtacgctggatatcgcagcggcagtacggactgttgaagatttatcgcttatatccaccatgcgggcacggccttcttcattaaaatgagaaaatccattcatatttaaactctccttacttctgatcatacactattttctccctgatgtcttatcctataatgttccaattctgatgtattgtttgctgacagcaggttgataagctacacttaacttattataacagaggtgaaataatatgatgatcttacaaattaatcagctatccaaatcttttggcgctgatcctattttaaacaatataaagcttgaagtcagatctcgggatcgcatcgccatagtaggcagaaacggagccggcaaatcaactctccttaaaattatcgcaggtcacctttcatatgaaaagggtgaattaatcaaaccgaaagaattaacgatgggatatcttgcccagcacacaggcttggaatcccagcttaccataaaagaagaactgctgagcgtttttgatttcctgaaagcaatggaaaaagagatgcgctctattgaagaaaagatggccacggccgccccggcggagcttgagacgctgatgaaaacctatgacagacttcagcaggatttcaaggataaaggcggctatcaatatgaagcggacgtccgatctatccttcacggactcggcttcggaaaatttgacgattccgtgaaagtgcaaagcctgagcggcggtcagaaaacaaggcttgcgctcggaaaactgctgctgacccagcctgatctgcttattctggatgaaccgacgaaccatctcgacatcgatacgcttacatggcttgagcattatttacagggatattcaggcgcaatcctgatcgtttcccacgacagatactttcttgataaagtcgtcagccaagtgtacgaggtctcccggacagaaagcaaaaaatacctcggcaactacagcgcctatttagaacaaaaagctgagcagtatgaaaaagacctgaagctgtatgaaaaacagcaggacgaaatcgccaagcttcaagattttgtcgaccgcaatctggccagagcttctacaacgaaaagagcccaaagcagacgaaaacagcttgaacggatggacgtcatggcaaagccgctcggggatgagaaatccgccgccttccgttttgacattacaaaacagagcggaaacgacgtcctgcgcgtacaggatgtttccatcagctatgacggccagccgccgctcttgaaaaacctgaccttcggcatcacaagaggtgaaagcgccgccctcgtcggaccgaacggaatcggcaaatcaaccttgctgaaaacgattatgaacgcgatcagtccggaatccgggtcgatcacgtacggttccaacgtcacaatcggctattacgatcaggagcaggctgaactgacatcgtctaaacgcgtgctggacgagctgtgggatgaatatccggacatgccggaaaaagagatcagaacatgcctcggcaactttctgttcagcggagacgatgtcctgaaaccggtccgttcgttaagcggcggggagaaagcaagagtcgcgcttgccaagctgatgcttcaaaaagcaaactttctcatccttgatgaaccgacaaaccaccttgacctggacagtaaagaggtgctggaaaacgccctgatcgactacccgggcactctgttatttgtatcgcatgaccgctactttattaacaggatcgccacaagagtgctggagctgtcacctgatcatgcagaagaatatttgggagactatgactattacaccgagaaaaaagcacagcagctggaactggaagaaatgaagcggcaggaaaaggagcaggctcagcctgccggcaaggtcaaacaggatacgaaaagaacttacgaggaagaaaaagaatggaagaagaaagaacggcagcgcctgagacgcattgaagaaatcgaagcggccgtctcatccgccgaagagaaaatcagtgccaatgaggagctgctgtgcgaccctgacgtgtatcaggatcatgaaaaagtacagaccattcacgcggagaatgaagccctgaatcaagagctcgaaaacttattagcagaatgggaggaactctcctcagaagaatagaaaaagtcaagcacctctttaaggggtgcttttttatccacagctatcctccttgtcagccatttaagtaagcgctttatacacactatccacaaaattttctgactttatccactttactaacaacttacagccccttatccagcctggatttttggatatattcacaatcctgtggatatgttagaattatctgttaataagtaaaaaaaagcctcacgttttacaacgtgagacgatcaaaggatgttaattccaaaccgggctgtccgttcatatcatatgagccccgaatccccttttcaaaagcaacggttccggcagccgcaatcatcgctgcattgtccgtgcataaagaaagcggcgggatgataagctcgggatctcccgaatggctgaattcctgctgcagtgcggctctcagccctttgttagcggctacgccccctgccagcagcacttgtttcaccccgtattctttcgcggccttagaggtttttgccgtcagtacatcaatgacactctgctgaaagcttgcggcaagatcctccggaggaatcacctcatttttttgcgaggcgttatgaagcgtgttaatcacggctgacttcaggccgctgaagctgaaattgtaagacccttcttccagccacgcacgcggaagcggaatggaatccgttcccacagcagccagcttatcaatctgcggccctcccggataaggaagccccatcgttcttgccactttatcgtaagcttcgcctgcggcatcatccagtgtttcaccgataacctcgaatgaaccgtgccttttcatataaaccaattccgtatgtccgcctgacacaaccaaagcaagcgccgggaattgaagctctcctatcagcctgtttgcataaatatggcccgcgatgtgatggacgccgactaatggtatttgatgggcaaagcttaacgcctttgccgcattgactccgattaacagggctccgacaagtccgggtccttccgttacggcaatcgcatcaagatcatcaaagcccatctccgcttttgaaagagcttcctcaatcacaagggtaatctgctccacatgatgtctggacgctatttcaggcacgaccccgccgaaacgtttatggctttcaatttgagaagcgacaacgtttgaaataatttcattcccgttttttacgactgaggccgctgtttcatcacagcttgtttcgattcctaatacataaatatcttgtttttcactcatgtaatgtcacccacattaataacgcatcttctccgttatctgtatagtattgttttctgattcctccggcctgaagaccgaattttttatataaggattgggcgggatgatttgagaccctgacttcgagagagagccttctcgcctttttttctctgcacaattctatcgcagagcgaaacagcgcttctcccaatgattggccccgatattccggcttaatggctatgttcgtaatctgcgcgtcatctataataatccagattccgcaataccccgccagacagccgtccttttcaatgacaaggtagtgggcatacggattttccaaaagctcatgataaaatgaatccttcgtccacggagaagtaaaggatgctgtttcaatttcataaatttgatcaatatcttccggacgcatgcttcgaatcgccgttttcgttttcatccctatcaccctatttttgagattccatccatttcgcttcagcctctgccagacgcaaataatccggaacaaggctgtggacatccccttcctctttttccaagcctaaaaacgccagctctgacggccgcggattatgctgtgcagccgttccaatcactgcttgagatgtcaattcatgaagaatggtttcttcatgaatggctgtatcgtgccctaaaaataaaaccggagacgctttttctttcagcatgccgagccaatcagtcaaaaggacattctgatcaggaataacggatcgtaatcggccgtcctgatattcataaagccccgtatatacctgtccgcgccgggcatcaaataacgggcagatcagtccttgaaagtgccgtccgttagccgccagcacctccagactcgagacagcggaaaccggaagcttcagcgaccatgccaatgtttttgccagcgtcacaccgattctgacacctgtgtacgaacccggtcctttcgctaccgctattttcgtaaggtcctgcggtgttaggccgcaatccttcagcaatgaattgacagcaggcatggcccgcacggaatgattcttttttaaatatgtaatatactccgccatcaccgttttgtcacgaacgagcgcggcacccagtgtgtaatttgacgtatcaattgccagtattgtcatgtttatttatctcctcacaaagcgtttcataccgtgttccgcaagccgtaaaggtaatgtcccttgcctcatcaccggctcttgtgatgacgatctgcagccgttcagcaggcagctgatcctgaattaaatgagcccattcaattaaacagacgccttgtccctcaaaatattcttcaagccctaagtcttcgctttcatcctccatacgatacacatccatatgatatagaggaagcgaaccgtcatggtattcttttataattgtaaaagtcgggctgtttaccactctcgtgattcccagtccttcggcaaaaccctttgtaaaagtcgtttttcccgcgcctaagtcgccttccagtgtcaaaatgtctcccggctttgccaaagaagcggcaagcttggctacggctttcgtttcttcggggtttttcgttctccattgtaatgtcttcaaagtgagtcacccgtcttatttaaaatgattgtatccttttttctcaaggacgatttgtctctgatcattggctgtcaaaagaacacatgcttccttccgttcagataccgctcctatcttcgcaatcggaatgcccgattgagtgcagtaatcaagcaaagaggtccactcttgctgagaaaccgttccaaccaattcaaaatcttcaccgccgaataacacccatttcttccactcagaatctgcctcaggcaaatccggatgcaccggcagaagttgttcttcaatttctatcgtaactgaacttgccgcagctatttcatgcagctcactggccaatccgtcactgatatcattcagagccgcgcgctgaagctgagagcagaagcggccgacctgaactctcggaacgggccgtttatgtttttggataaaataatcagtcgtatgaaaagcagaagggagtgtttctcccaataaaagagacagtcctgctgcggacgaaccgatatcccctgtaacaaacacagcatctccgggtcttgccgagcttcgcagacaagcgcaatccttctcaacttctccgatgacagtaacggtaattacggcttgaccggaagcggagacggtatctcccccgatcaaatccatttgatatagtttcgccagttccgccattccttcatacattgcctggacgtcagctttctgccagcaagaaggaaccgctagagacaccaaataaaacttcggaatgcctcccatcgccgccacgtcactaatgttaacagcaagcgccttataaccgatatcatgaggagaggaatactctaatttaaaatgaacattctccaccattgtatcaaggcagacaatttgctgcatgtggggtgatgctgtataaaccgcaccatcatcaccgatccctacctcgacggaaggatgataatgcgaatgcggtgtaatactgtgaatcaaatcaaactcatccatatatctcccgtctccctttctgacgctcttgtgaaatacagctctttctagtgtatcggattatgtttcaatatccaagactttaacgatataaaagaaagcttggttagataccaagctgccagcattaaaagaaaacacaaaaaaaacgaaaacatgatcgtttcgtttacaataaaaatggcggtccggacgggactcgaacccgcgacctcctgcgtgacaggcaggcattctaaccaactgaactaccggaccatttattttttggttgcgggggcaggatttgaacctgcgaccttcgggttatgagcccgacgagctaccgaactgctccaccccgcgatgataaaattttagaaaagcttggcggcgtcctactctcacagggggaaaccccccgactaccatcggcgctgaagagcttaacttccgtgttcggcatgggaacgggtgtgacctcttcgctatcgccaccaaaccattgagagtgttctctcaaaactagataacagtaagcatacattcaaattggttaagtcctcgatcgattagtatctgtcagctccatgtgtcgccacacttccacctcagacctatcaacctgatcatctttcagggatcttacttccttgcggaatgggaaatctcatcttgaggggggcttcatgcttagatgctttcagcacttatcccgtccgcacatagctacccagcgatgcccttggcagaacaactggtacaccagcggtgcgtccatcccggtcctctcgtactaaggacagctcctctcaaatttcctgcgcccgcgacggatagggaccgaactgtctcacgacgttctgaacccagctcgcgtaccgctttaatgggcgaacagcccaacccttgggaccgactacagccccaggatgcgatgagccgacatcgaggtgccaaacctccccgtcgatgtggactcttgggggagataagcctgttatccccggggtagcttttatccgttgagcgatggcccttccatgcggaaccaccggatcactaagcccgactttcgtccctgctcgacttgtaggtctcgcagtcaagctcccttgtgcctttacactctgcgaatgatttccaaccattctgagggaacctttgggcgcctccgttaccttttaggaggcgaccgccccagtcaaactgcccacctgacactgtctccccgcccgataagggcggcgggttagaaggtcaatacagccagggtagtatcccaccgatgcctccaccgaagctggcgctccggtttccaaggctcctacctatcctgtacaagctgtaccaacattcaatatcaggctgcagtaaagctccac

SEQ ID NO: 6 - DNA, 240395 bp, Bacillus subtilis
catcgtttacggcgtggactaccagggtatctaatcctgttcgctccccacgctttcgctcctcagcgtcagttacagaccagagagtcgccttcgccactggtgttcctccacatctctacgcatttcaccgctacacgtggaattccactctcctcttctgcactcaagttccccagtttccaatgaccctccccggttgagccgggggctttcacatcagacttaagaaaccgcctgcgagccctttacgcccaataattccggacaacgcttgccacctacgtattaccgcggctgctggcacgtagttagccgtggctttctggttaggtaccgtcaaggtgccgccctatttgaacggcacttgttcttccctaacaacagagctttacgatccgaaaaccttcatcactcacgcggcgttgctccgtcagactttcgtccattgcggaagattccctactgctgcctcccgtaggagtctgggccgtgtctcagtcccagtgtggccgatcaccctctcaggtcggctacgcatcgtygccttggtgagccgttacctcaccaactagctaatgcgccgcgggtccatctgtaagtggtagccgaagccaccttttatgtctgaaccatgcggttcagacaaccatccggtattagccccggtttcccggagttatcccagtcttacaggcaggttacccacgtgttactcacccgtccgccgctgacatcagggagcaagcccccatctgtccgctcgacttgcatgtattaggcacgccgccagcgttcgtcctgagccaggatcaaactctccgataaagtagtttgactgactacgcacatcgctgtgcgatttatttaaaactttgaattaacaggtacgttttgtcttgtttagttttcaaagatcattataatggagcgggtgatgagaatcgaactcacgacatcagcttggaaggctgaggttttaccactaaactacacccgcgtttgaattggcgcgcccgagaggagtcgaacccctaaccttttgatccgtagtcaaacgctctatccaattgagctacgggcgcttatcaggcgacttaactatcatactaccaatcggttatgatgtcaagtgtttttttatttcttttcaaagtctttttctcgacctcatttattatacacgctttcgagaatttgtaaagtcttttttcaaaagatcattttctcatttgtcgttatcgctttgttcatcagcgacgtctaataatataccatgcactttaaattaggtcaacacttttacgaaacttttttctcacttattattcccttctatgtaataaataaaaaagcaggattcccaggaaccccgcgtctattcagattacccgctcaccttggcttccgcgctattacgatctgttttttcataagcacggaagttttgttcaagctgttcgagcgacagacctttcgtttccggaaggaaccttttcacaaatataacggacgctatccctaacaagacaaaaatgaagaaggttgcagacaatccgatgtttgcgagcaggaccggaaaagtgaaacccacaaggaagttcacgatccagaggcagaagacagtgacccccataccaagtccccgcaatcgaagcgggaatatctccgacagcatcagccaggtcaccggagagacagccccctgctgaaacgcaaggaaagtgactgttaatgaaagaaccacataaggaagagcgggcgatcctttcagcacgacagacagaactccgatcaaaagcagcaccgcagtcgttccgatcagccccgtcatcagcatcgggcggcggccgactttgccgagaagccatattcctacaaaagtcgcgagcaccgaaatcacaccgttagcgatattgccgattaatgcggcttttgtctcgaaaccggcatcttttaaaatttgagttccataatacataattgaattcacgccggtgagctgctgcactaccgcaattccgatcccgacaaacacaatgcggcgcacccacggaacggcaagatccttaaaggcggcctgctccatctcagcttccttatgaaaggcagattcaatctcagcgagctcagacttcgctttctcttcattccttattcgccggagaacgcgcagagcatcttcttttcttcctttagaaaccagccagcgcggactttcaggaactttcagcataccgaaaaacaagaataccgccggaagggccgcgataacgagcatatagcgccaagcgtgagaggtatcaccaagcacattgccgatgatagcattacacgtgaaggcaagcagctgacccgttacaatcatcaattcattttgggtaaccattctccctcggctttccgccggcgacatttcagccaaatatgccggtacggttacggatgctcccccgacggcaagccccagcagaaaacgggagatgatcataaccgatacgttaggcgccagtgtacatccaagcgtcgctgcaaagaacaaaacggcaaggataaggatatttttacgtctgccgttatagtccgacaatctccctccgaaaaccgcgccgatcgcagcccccaagagcagggagctcgccaccatcccttcagtcaaagcggtaagattaagctggtcagcttccgccataaacggcagcgccccattaatcacaccggtatcgtagccgaaaagaagccccccgaatgtcgatactaaaatgatggttctcaaaaatgaatgctggctgctatttttattcatcttcaaatcctcctagtttttacacagagataatatcggaatattcagttatcaatatttacacctctaacatctgcatacaagttctgaccgtccaaaacagttatataagaagaaaatgttccgaaagcgttatcatttatagtgattattcgctctccccctctcgtcatattgttattttatagttactttgtagtgaagttataatgatattattggcacttatgttattatcataattttaaaagcgctttcagtcaataaatatttcataaaattttataactcacctttatattacctatatataatcaattttcgttttatatcaatttatttccataacatactcaatgaattacccctattataatcaataattgattacatattgaaaacccccaactgctgattgggggtttttgttttattcttcgtttattgtaacaatcgttctccctctcgcttctccttttaaaagggcaggaagcgtatccggcagctcttcaagtgtaatttccttttgaataaaggcctccagatctgcaggcttgaagtcatcagctaaacgctgccatattttctttcttgtctccatcggacagaatacggaatcaattcccaagagattgacgccgcgcaatataaacggaaagactgtagccgggagtttcgttcccgctgtcagtccgctcacagcaactgatccgccgtactgaatctgactgagaactgaagcaagcggctcacctccgaccggatcgacggccgctgcccatttttgtttttgcatcggttttaacgtgccgttatacacttcgtcacggtgaatgaccgtctttgctccgaggctcttcaaatacccgctttcttcttcttttcccgtactggcctcaacctcataacctaaggttgaaagaatggagacggcaaagcttccgacgccgcctgtcgctcccgtcaccagcaccttccctttttcaggagcggcatggttttcttcaagacgccggacggacaatgcggcagtgaagccggcggttccgatcgtcatggcttctttaagtgtcagaccttcaggcagcggcacgatccaatctgccggaatgcgggccatcccgctatagccgccaaaatgggaaacgcctatgccgtagcttgtcgcaatgactttgtccccttctttaaaacgggcgtcctctgaagaaacgacgattcccgctaaatcaattcccggcacgaaaggatacgacgttacgatcttgccgtcaggaatggcagccaagctgtctttataattcacccctgagtagcaaaccttaatcagcacttcaccctcgggaaggtcctgaaccgccagctcccgtacgctgactgaaaaccggtcttcatgttgatcgactactaacgctttaaattgatctgtcatcactacgtctccttaaaatgaattgaatggctttggaaaagcataaaataagtttgatttgttttcaaatgtcctgtcctgtgtagtatgatcaaaagtaaaaacagcgaaagagtggttacgcatcatgtctgataaacaaaacaaagataacaaaaacaacaacagcaatcagccattaccggacattattcataccgccgttttcaaggcgccgatacaagttgtctgggatacggtctctacggcggacggcctgtctctctggtttatgccgaatgatttcacacctcaagaagacagtgagtttcagctggaatctccgttcggtccgtctccgtgcaagctgctggatattgaagcgccgtaccgcctttctttttcatgggatacggaaggctggatcgtttcttttgtcttaaaggaaacggaaagcggggatacggaattcactctcattcacggcggatggaaagagccggaagccgtcatcaataaagtcaatcggaaaagctccgagattcacagtacgatggatcaaggatggaacgggcttgtcaacacgaaacttcgcggggcggttgaggcttaacacaaaaggacggacacggtttccgtcctttttttgatgccgatacataaaaactgaatttgcaaagacactaacagaagaaccgaaaacttctttcagggggcgctgtttatgtattattacaaagaagagctgatcaatatcattaaaccggacaagccggacccggccgcggccaaggtgcttcaggaaattttaggcgggcattacggggaaatgcggacgatgatgcaatactttttccaaagctctaatttcagaggaaaagaaaaacagttccgtgacctgcttcgcggtgtatttttagaagagatcgcacacgttgagctcgtccagcatacgattaatgcgctgctcgatgaaagcggcgctgagggcgccggaaatcaggcagcagatcaggcgccgcttgacgaagcagttaaacacgccaatccgcaccattttatcatcggggcgcaaagttctcttcctgtagacgccggcggcaatccatggaacgggtcttgggtatacaaccacgggaatctgatttccgatctattggacaatgtcgtgctggaatcaaccggcgtgctgcaaaagacgcgcatttatgaaatgagttcaaatcagacgttcagagaaacactcggttttctgatcgtccgtgacaacgcccatcaaaatgcatttacaaaagcgctggaaacactgggtgtcgaatggggcaaattatttcccgtgccgaattatgatattgaaaaatacccggaatgccggaaattcgttgaaatgggttatcataatacccaatttaatttcagactggatccgacacggatcggagaaattctgcagggaacgacgccgagccgaaacggcggcgaattaagtgtgtccgagcctcctaaaggtttccccgtcccggaacttcccgagcttccgaatgagcacagccccggactgaaagatatgaacttgtaacaaaaaacgcctgtttcgggcgttttttgtttttctgaatatgaggtttgaatgtgttcaaaacggggaatataagccgggagatcttgccatacggccgttattttgatgtgagcacattgcggtacatacttcgtttcgaaagttgtcctaattttccagccggccggctgggtatgtttgaatgataatgggaattatgtaaagagaacaatgtcttttttaaggaggcagcgaatgtctaagcaaggaaacttccagaaaactatgtcactttttgatcttattttaatcggcatgggagccatattcggttcggcatggctgtttgccgtcagtaacgtcgcctctaaagcgggcccgtcaggcgttttttcctggctgatcggcgggggaatcatcttattgatcggcttggtttatgcggaactgggcgccgcgctgccgcggaccggggggattatccggtatcccgtatattcacacggacacctggtcggatatttaatttcctttgtcaccattgtggcatacacgagtcttatttcaatagaagtcacggcagtccgccaatacgtagcgtattggtttcccggtttgaccgtaaaaggctctgattcgccgacaattaccggatggatattgcaatttgcgctgctctgcctgttcttcctcctcaattactggagtgtcaaaacctttgcgaaagcaaacttcattatttcgatttttaaatatgtcgtaccgattacggtaattgttgtactgatttttcattttcacccgggcaatatgaccgttcacggattcgcgccttttggtttcaccggaattcaggccgcgatttccacaggcggcgtcatgtttgcataccttgggctgcatccgattgtggctgtcgcgagtgaagtgcagaatccgaagcggaacattccgatcgcattgattgtctgtattatcgtttctactattatttacaccgtactgcagctcacttttatcggggcgatcccggcggataccctgaagcacggatggccggctatcgggactgaattctcccttccgttcaaagatatcgccgttttgctcggtttggggtggctggcgacattggtcattttagatgcgattttatcaccgggcggtaacggaaatatctttatgaatacgacttcacgtctcgtctatgcgtgggccagaaacggaacattattcagcattttttctaaagtcaataaagaaaccgggacaccgcgcgcctccctttggctttcgttcggtctggctgttttttggacgcttccgttcccttcttggaacgctcttgtcaacgtatgctccgtcgcattgattctgtcttatgcgattgcgccgatttcttctgcggcgctgagagtcaacgcaaagaacattaacagaccgttttatttaaaagggatgagcatcatcgggccgctgtcgtttatttttacctcttatattgtatattggtccggatggcgcaccgtatcctggcttctcggttctcaaattgtcatgtttctgatctatctctgtttcagtaaatatgctcccaaagatgatgtcagcatacgccagcagctgaaatcagcatggtggatcgtcggcttttatgtcatgatgctgattttctcctatctcggctcgttcggccacggattgggcattatcagcaatccgcttgacctgattctgatcgccatcggttcgctcggtatttattactgggcaaaatatacgggtctgccgaaggctatgatcgacagtgataaatgacgaatgccggaaagaagtatggtcttctttccggtagttttattttaagggatgacaaaaaagcgaacatacgataaaatgaatgacagtcattcataaaaggaggaacccctctattggcaaaacaaagctcgggaaaatacgaaaagatcctgcaagccgcgattgaagtcatttctgaaaaaggattagacaaagcatccatttcagaaatcgtcaaaaaagccggaacggcccaaggaacgttttacttatatttttcttctaaaaacgcactgatatccgcgattgcagaaaacctgctcgacactacgctggacagaataaaagggaaaacggacggttctgaagatttttggacgttgctggacattttggtagatgagacatttcacatcacccggcttcataaagatattatcgttctctgttattccggtcttgccatcgatcattcaatggagaaatgggaagccatttatcagccctattattcctggctggaaggcgtgatcaatacggccattgaacagggtgaggtccacagcggcattcatgtcagatggacggccagaacgattatcaacgttgtcgagaacgcggctgaacggttttatatcggctgtgaacaggatgtcgatctcgaagtatataaaaaagaaatattcagctttctcaaaagaagcttgcagaaatgattggcggagaccgatcatttttgaccgccgtaaaaatgactgacattcattcataactgaggtgactgtatcatgtattggctgcttgtattgatagccggactgttagaagtagtttgggcgtccgccctgaagcatgcggattcgctctttgattggattggtattttccttttgattgccgtcagctttctgatgctgatccgctcttataaaaaaattccgatggctgccgcatataccgtttttgtcggaataggcaccgtcggcacatatgtaacgggcgtcattttaggcgaatcgttttcaatcgggcaaatattctttttggctttgctgttgtccggcattttaggaatgaaggtatttacgaaagaaactgaaacaaggggtgaacattaatggcatggctgctgttatttattgccggagcggaggaagttgtagcggccgttgccatgaaacatattgacggttttaaaaaaaagtggccgctgattgtcatggtaacaggctttatgctttcattcttttgcctttccggcgcgatgcaggttcttcccacaggtgtcgcgtatgcggcttggaccggcatgggaagcatcggcgtttcggccgtgggcatactttggtttaaagaaaaattcaatctgtcacaattggtgtctctggggcttatcctcatcggtgtcatcggcttaaaactgacagcgtgacggcctgagacagcttttcaaataaaaaacaaaggaccctaaacgagccctttgtttttttatgctgttttgatctgttctgcttttcccgctccgactccgaaaataaatatcagaacggagactgcgatcagcatgaataacggaaccgtccagccgtgcgtgatgtcatgcagcaaaccgaatacgagcggcccgaacgcggcaagcaggtatccgaatgactgagccatgccggaaagcgccgcggcttcatgaacatgccgtgtccgcaggctgaagaacatcatcgccaagctgaacgcacatcctcccgcaattccgattaaaatgacccatagcggagtgagagccgggcttccgaaaagaacgccggcaatgccgataaggaaaaataaagccgtcagtccggcgagtgcgcgctgatttttcattttagcggcagcgatcggcacgataaaagtaatcggcaggactgagaattgcattaatgaaagcatccatcccgccttacttgagctgagaccattctgctgaagaatttccggcagccaagcgatgacggtgtaaaaaataagggattgcagccccatgaacatcgtcaccttccaagcaagcggagaccgcagcagactgcttttcttctctccgtttgtcccagtcgtgcggacgggcagttcgcgtcctcgcatttgcggaatccacatgacaaacgcaatgaaagaaaggatagcccagcagccgagcgcgcctttccagcctaaccccgctgaagaggcgatcggcacgctgatgccggatgcaatcgcgccgcacagattcatagaaaccgagtagacgccggtcatgatgcctaaatttccgggaaacttatgtttaatgagactcggcagcaggacgttgcatacggcgatcgacaatcccaacagaatcgttccgaaaaagagagtgccgattccggcgatggagcgcagcagagttccggctgtcaggacaattaatgatgacagtaagacaatctcggtaccgaagcgccgggacaataaaggaacaaacggtgacagacatgcaaatgccaaaagcggcactgtcgtaatggtgccggcagccgcattggtcatgccgaggctgtcccgaattgaggaaacgagcggcccgaccgatgtcagaggcgctctgaggttggcccctatcaatatgactccgatgaccagcaatatcagttttttacgctgacttgcttgcagaatttgatgttcgtctttaattttcatgttcatcctccatgtgtattgtatctttaaatactgtgatgtattggttgacggcctccatggcctgatccggtttctgtccgataatcgcggcggcaagctgggtgtggatccgtatagcaggggtgatttccaacaggttatggactgacgcacaaagcgcctccgtcatatgctcgtaaagatcagaaagcatgttgttatgggccgcctgtacaatggttttgtgcagtttaatgtcagcctcggcataccgttttcgatcttcattttgcaaggccgcttcacattcatccaagcacaccttcagtgctttcaggtcttcgtcattacgcctttccgccgccaatcgcgcagcttctcgttcgagtgcgtatctgacttctaatgtttcaagcaaatttgattttttaatatggcggtaaaatgccgcgccgagaacactggatgagctgacatacgtaccgctcccctgccttgtctgaagcaggccggcatgtacgagcgcccgaatggcctcacgcaatgtgtttcggctcacatcaaattgcttcattaaatccagctcagggggaatgcgcgtcccgaccggccatttatccgattgaattaacgattcaatttgcgtcaccacttgttctacgagcgacagtctgcttgttttggatatctccatcaaaacacctctgaaatttgtaggatgattctatcattgggtaatataacataaaagaagcgaagatgtaaatcagcggcaacaaaaaaagagtgagtttttctctcactcttcggcgcttttatgaacgttttatattgactgaggtcacgacaaacttgtcatgacggtggcgggaaaatgaatattcaaagggagtgccgttgtccaaaaagcctacatgctcgacttcaagtatcgggtcatccggccggcagccgagatattgctgatccatatcatccgacttgcacgctctgatttttctgtgtgagcctgcgattttgagctggagttcccgcgtaatatgatcgtagatggaatggttgagcacctcgtcattaatgccgggtataaggctcgccggcatgtacgttttttcaagaacgtacggttcgccttcaacaattctgagccttactacataatagacgggagtcttttcatcgatggccaaatgtgcggcgacatcttgagacggaaactgcacttcaaaccggatgaccttgctcttgatattttttccttttaacaaattgctcaagccgagaatttcgttgctgactacgtgaacgtgctcatcctgcatggctgattgaatgataaacgtgccgtgccctctttttctgaaaagcatcccttcagccgcaagtgtatcaagcgcccgcttcattgtcatccggctgcacccgaactccgcagcgagcgtcttttcatccgggatcggctgatctatgtcatatacactgcttttaatcctctttctcatttcgttggcgattttttcgtacttattcatcggtttcctccggctgtataatgtttgatctgtatagactccttacggttatcataaatttttttcccggcttcatcaatgacgttacagccgccgatattgaaaatgaaaggatttccttgaattttctatggaatctccctcactattatggtagaattttttgcagaaacggacacaaccgaatattgcatacattgtataacctcaatgatatggtttgagggtgtctaccaggaaccgtaaaatcctgattacaaaaattgtcccgtacactttttgtaatcaggattttttattttctaaaaaataaaaaaaggagtatctgtacatgaatttcaaagtatttctgcttgcagcatctaccatcgcagtcggattggttgaattaattgtgggcggtattcttccgcaaatcgcttccgacttagatatatctatcgtcagcgcggggcagctgatcagcgtgtttgcgctcggttacgcggtatccggcccgctgcttttggcggtgacggcaaaggctgaacgaaagcggctttatttaatcgcactgtttattttcttcctaagtaatctggtggcttatttcagtcccaatttcgccgtacttatggtgtcacgggtgctcgcttccatgagcacagggctgattgtcgtcctttctttaacgattgctcctaaaatcgtggcgcctgaatacagagcgcgggcgatcggcatcattttcatggggttcagctccgcaatcgctttaggcgtgcctgtcggcattatcatcagcaatgccttcggatggcgcgttctgttcttgggaatcggcgtattatctctcgtttccatgctgatcatcagcgtctttttcgaaaaaatacctgctgaaaaaatgattccgtttcgtgagcagatcaagacgatcgggaccgccaaaattgccagcgcacatcttgtcaccttgtttacattggcggggcattacacactctatgcctactttgcgccttttttggaaagaacgcttcatttgagttccgtttgggtcagtgtatgctactttttgttcggtctgtcagcggtatgcggcggcccgttcggaggctggctgtatgaccgtttaggagcatttaaaagcatcatgcttgtgaccgtttctttcgctctgatcctgtttattcttccgctgacaacggtttctttaatcattttcctgcctgcgatggtgatctggggattgctcagctggagccttgcgcctgcgcagcaaagctatttaatcaaaattgcgcctgagtcttccgatattcagcaaagcttcaacacgtccgctttgcagatcggcatcgcgctcgggtcagccatcggcggcggcgtgatcggacaaaccggttcagtcacagcaacagcctggtgcggcggtttgattgtcattatcgctgtcgcgttagctgtattctctttaacgagacccgctttgaaaagaaaatccgcataaatgtgagaccgcaaaaaagccaaaggagttccttcggcttttgcggtctttttattttgcggcagcaagctcgtcttctgtcacccatttatgattggttactttttggccgccgtcagtcggtgtatagtcgaccatataaacggttgtctttttggctgaatcaataacggcttcggcgcccttcatgcctttcatatgggatgcctcgatcacggccttgtcacccggttttaacgttttattaccggcgcccttcagctcttcctgaatgacccatttatgatcttcgacgcgctttcctcccgtttccggagtgtaagatacactgtaaaccgttgtatcataagcaccttttacggttccttgcgcatttttcatgcctttcatatgagaagctaaaatcatgacgtcactgccgaccttataagtcggattttctgccttctttaaacctttcggcacctcggatgaacctgagtgattcatgtcttcgtgagagtgcgtttctttgtctttcgctttttcgcttcctcctgaagattggctgttgcatccggcaagcgccagaacggggatcaggagaaacatgctgaataaaaatagtctcgctttcatttcaagaactcctttgcctttttgatttttcactttccctttcgtttcttcagtaaaacaaaaagatggcctgtcatttctcctaattcttcaaatctctctttattgcctttcatcaggtgaaattgttcacaaaatgtacacattaatggagatgcagtataattcaattatcagataatagggggaactcatcatgaaaacgaaggtttttgcggtggtattgggcgctgttttaatgattgcggggttggttttggcagaagtttcgctttatatggaatacatcacaatgctcggagctatgattttttcttctatatttatgtcagagccgaaaagaaaatttcgcgtcatcaaagaggtttgacttttctattaccgccgtcttctcaggacggcggttttgttttgcatgtcactcagtctatccgcacagccgtttcttctgtaccgtcctgatataaaacgaaatgcggggctgtttgtgctttatcacctgcaaattcaatttcaagcggcagcgccctgacaaaataacgggtttccgtcattgggaataattcgaatggagtctgcccgtctattgtaagatacaatcggttttcttttaccgccaccgatgcatgtgtgtcatcctgaaatgagtaattgccggtaaatctgctgtaaatcgcaggatcgatatctgcttttttctgatccgccggacgtttcggaatcacgtacggctgatcaaataagatgtttacggccgcggcaatcacagcttgttcaaattgatacgattgttccatattgctgagataaatcagtgttttgttctggtcaatataccggatcatcagagttgaatagcccggccagcctccgtcgtgactgataaccttccctttttggcggctgttttgaatcatccagccaaatccgtatccgaattgctcttcttcattccaatagcccggcgtaaacgcttgatctttagactctttgccgatgatttcttccgtataaagagcctgatcaaacagatataaatctctaatagtggagttaacggttccgtcaccttgaatcccgtcaagaaagacgacataatcggtttcctcaagttcatccggcagcacatattctccggaatgaacatcatacacatagccatatgcatagttcggaatgttttctttactcagccttctgttataaatccgcgtatcgtgcatacgaagcggatgaaatacggcttgtttcataaattcagcaaaactcatgcccgatacaatttctataataaccgctaacaccgcataccccgtattactgtaaagccactccttgcccggcgggaaataagcatccggtttatgctgcttaagcatatcgatcacatcttgattaacggcaattctgtcccggtcccaatgtgttaaaaataactccatatagtccggcaatcctgacgtatgatggagtaaatgccgaatggtaatgcccggataaggaaaatcaggaagccaccgctctatcatatcgtcataacgcagcttcccttgctgctctaaaatgataacgcctaaagctgtaaacggcttcgatactgaggccaattcaaagaccgattggtcattcagcatcctctttgttttcagttctgcagcgccgaatgaaccctgatataagatgcggccgttttccgctgccaatacagctccgtttatttcatgtctttcgtctaaagtgctgaaaagctgttcaaaagcttgttttttcttatcgttcatttcacgaacccccatatacaagctgatttactcttttatacgaacagccgctttagaagtttcaatattttcccttccctgaacaccagtcagtaaactgccgttcaggcagccgcggaggtttaatgaaggtcttttattcgcacaacactgtgcaggcttcgaactcaacatgcttctcgtctttttttgcgccggcaatttccatagtcgaaaacatcgcacagacgacggctttgtattcgttcatgacggtttgaatttcaatcagaaaccgttcggatgaagaggcgtattccgttacgtattctttcattttgccgataatatcatctgcctgacggatgaagccggccgcctccaagtcactctcaaactggtttttgttgatcatatgaatatgcatttttcaaggcccctttcagcagcgttttgtggttatccactgtaaaggacaggcttggataaacttttaataaaatatgaacaaaatatgaattggctcatcggcctgaccggcgggctttcggctgtgctccgtttcatttggactacctgaaataatgacttctttactctatgaaaaacagctcatatatgatctaataccagtaaaatgaacgttaggaggcggcctatgtcagcagcaggaaatcggcaaaaattttgggtcatggcgatgcttatagcggtctttgccgtgtttgttttctctttttctgagaatcattcacaaaagaactggcacacggcggttgaccaggcgtcagtgaatgtcttcggccagcagatctttgaaaaagaccgtctggcaaaaacactcgacgcacgtgaggcagaatctcttctgactcttgtgaaacttgcaaatgaagaacatcacatcatctaaaagccattataaaaagcctgtttccctttggcagaggaaacagctttttccatgtattattgagcatgtttttgttcaataaaccggtcgatccgggccagaacatccttcatgtccatacattctttaaagctttcattaatggcttgaatgccttgtttgtattttccgttatgcagcacttcttccgcggcaagctttaccttttcagcgctcacttcatctttttgcactgtatagcctgcatccaattcagtcaggcggcgcgcaaccatcggctggtctttatcatgcggaataacgaccagcggcacttgataatgaatgccttcatttacactgttcattccgccatgcgtgacaaacacgtcggcctgctccagcacttcaagctgcggcacgtacggggcgatgataaagttttccggcgcctgtttgattttcgacagatcggctttttccccggcggcaatgactacttttccttcaaaatctgagaacgcgtctatgcacagattgaaaaacgcttccgtgtccccgagcaccgttcccattgagatataaatgactttttcattctttaatgagtcaatcgggaagtcgacgcgcccttttctcttcggaaaactcggaccgataaataaatactcatctccgaatgtctcactttcgggctgaaaatatctgcttgtatagacgacgttcaattcacctgtgttgttcataaattgaaccatgctgtcaggggcgacaccgtatttgtctttcatctcggccaacagctcttcacattccctgtccggctgaaacggcacgcccgattccggatggagcggcagtattttcagacggtcttcattgaacaggaaggatgctgaagaagagatgccgggaatgttgagataatcccgcaccagctctcccgcaccgaatttatcataatagacggcgtcgaattgaatgtcctctgccagccgctgcacaatatgtaaaatctccagtgacgttttgatatgaacctttaaaaatgcaagtatgccggacggactgccgggatcaatgggtgtcattctgagcagatcgctgtgaaggtgaactttcgctcctactccttccagtctgcttttgtatttttccgttgagatataatgaacgtgatcgccccgttcgctgaaggcctttgtcatacccaaagtcgggtttacgtgtccttctgcgggaaaattgatcatcagaatatgtttcgccatttttcaaactcctttgccttttttgcgtctcttccatatccatcataaatgacgcggaaaaaatcatgcaaggaacatccgtcaggtctttatgacggttcgatgacatcggcaaaaaaaaagacaaggcttttcaccttgtctatcgtgatgattcgtctgtttcttccgctctcagcacgcctttcagatgttcttcatcatgcttgagatgctccgtcatatattgcacggcttttgttttgtcgcccttttttatttcttcaaagatttttcggtgctcatgcagaataacctccgcacggtcatcgcctttaaaattaagaactctgcaaaaatgaatcagcacattgacatgctcaagcagcatggccagccggctgttatggctgaaatccacaaggagctgatgaaacgactcgttcaaggaaataatctcagtctctttgacgcctttattgatggcttcttccgtcttgcgcagctgtttttcaatgaggtcaatttcactctcagccgcttcatcaataaccagttcgactgccagtgattcaagtgacattctgattttataaatctcttcaacatccttaacggacaaagaataaatgacaaagccgtttcgatcgtctgccgtcagaagcccgtccttttcaaggagccgcatggcttctctgaccggcgaccggctgactccgaaatccttggccagctgagtctcattcagccgttcacccggtttaaaaatcccgtcaaatatcatttttttcaattgggaataaaattgcagataatacgggattggcttatctaatttaaaattatccatctttcctacctcttcatacaatttaggccttattgttaccaagatcatataacagtttatctatggaagcaacattcccgagcttgtcagcatatcggaggtggcgtaatatggaattataatgaacgacggtcgacggtctgccgtaaaccgaaaacaattcattcagaggtgacggaaacatgaaaacatacaagattgccagcataccgggggacggtgtggggaaagaaacagtccctcaagcggagcgggtgttgaatgcgattgccgaattacatggaggcattgcctttgatttcacttcttttccgtggagctgcgagtattatttggagcacgggactatgatgccggatgatggattagaaaggttacagcactttgatgctttgtttttgggggcggtggggaatcaaaaactcgtccccgatcatgtttcgctgtgggggctgctcatcaagatacgccgggaatttgaacaggtgattaatgtgcggccggcaaagctcctgccgggaatcacttcccccctcgttaacccgaaggattttgatctgatagtcgtccgcgaaaacagtgagggcgagtacagctctgtcggcggcagaatctatcagggtgaggacgaaatcgccatacaaaacgcggtcttttcccgacggggtacggaaagagtaatgcggtatgctttcgaactggcggcaagtcggcggaaacacgtcacaagcgcgacgaaatcaaacggtattgttcactcgatgccgttctgggatgacatctttaaagaggtcagccgggagtacgccgggattgagacggattcccagcacatcgatgcactggcggccttctttgtcacgcagccggaacgctttgatgtcattgtcgcttcgaatctgttcggagatgtgctgacagatatcggtgcggcgattatgggaagcatcggaatcgctcccgcagccaacatcaatgtaaacggcaaatatccttccatgtttgagcctgttcacggctccgccccggatattgtcggaaaaggaattgccaatcctataggccaaatatggacggcgaaattaatgctcgattcattcggagaagaggaactgggccatctcctcttacaatctattgaaacggtcacaaacagcggcattctgactcctgatgtcggcggaaaacattcaacggaagatgtcacttccgctattatttctcaaatcaagaacagataatacgaaaaaaccgcgggcagaaaaactgcacagcggtttttttcgtctcagacgggacggatcgcgcagaaacaggccgattcacctgtgaagcccgcaatacggcctgattgatccttttctacagaaaaaaaccgctgtatatcatgaggagcatccagcatctgtttttccagtaatgcggctttctcttcagtcaggcctgcccgttcacaccagacggtaaattgaaatggtttcaaaaagcagacagcggattcaatccggaagccggctgtctccagaaaacggagccattctgtttttttccacgcccgaaagtggctctgatcccgtttcttttcaatgtcattataaaaatggtcatattcatccttttcaggtgcggtattgtcaatgagaagcagtctgccgcccggtttgacaacccgaaacgcttcatgaacaaaggctctgacatcgggaaaatgatgcgccgcgattctgcatgtgacgatatcgaaagcagcatcggaaaacggcatcttttcagcatcgcctttttcgaatgacacgttcgtccatccgtttccggttataaatgcttcagcggctgctaacatttcttccgtgaggtcataggcgataacagagcgtacgagaggagcgagagcgttagccgtatgtccgcctcccgtcgcgatatccagcacgtccatatgcttttcggcaccggaagctgaaacgagatacgccaaatcctctcctgcggcgtgtcctggactagtcacatatttcgcggcgtttttggcaaattgccgctgcgcctgctgtttaattgaatcctccattatactcgggcccccttttctttctgcttgctgccttaatcaaaataaacgggttcgtccggatgtttgagatacgcaaacatcttttcaatctgactttctgtattgcgggcttcagatagcggcggcagttccgtttccgcaaaaaagccggcggcgcttgtttctgttccctccctgatccggccgccgatgatctcgcatttgataaacactttgtaaacgtgggcggcggacggcggatgggaatggcatttcttatccattacagctaacagtttaacgggctttacgtcgattcctgactcctcttttacttctttgacagcggtctcgcccggagaaatcccgatatcagcccatccgcccggcagcgcccatctgccgtcgcttttctctcttaccattaatatgctctgatctttaaaaactgccgctctgatatcaactttcggagtgggatagcccgtgtcaccggcgaatacgtctttgatgacccttttatcgatgccggtatgatgcgccatgatatccacgcttatttttcttatttcttcaaatctctcaatatcatatatgtctttggaataagccagccccgcttgcgccgcggattgaagctgttttgcccattcaagccattttggctccattttttcaccgcccgttatgttaattgacgaaaccccaagagtcaggatattgcaccttgagagtaccggtgcccatgatccgtttctgctccttgttttctgtctatgacggagcgaatcctgccggaaaatcagaaaaaagcaggccgatctcgtcataatggaacagggtttgtttttttacgtggcacagttttgcaaattcacccgttgtgaagtattttctgacgtcttcgctcataatgcctccttgactatacggtaaccatatcctttatgatgatcattgagaaggctgattcacaaatggcttacgtaatgaaagctttaccgtctcaaaaaaagcggaagaggagtatcaagtatgacgattgaaatcagaacagtcacggaagaaaaccgtgccgatatactggcgcttcatgtaagggaaagccagacttcatttattgaaaccgcggaagagtgcttacaagatgctgaggattgccggcattatcagccggccggtctttatgttaacggggaattggtcggctttgccatgtacggatggtttccggaatatgatgaggaaaatgaaaacggcagagtatggcttgaccgtttttttattgatgaacgctatcagggacggggattgggcaagctgttgcttgatgcccttatccgccatctcgttcgaatatatgattgcagacggatttatttaagcctgtttgaagataatgtgcacgcattgcggctttatcaaagattcggcttttcattcaatggagagctggacttcaatggtgaaaaagtgatggtgaaagagctgtaaaccctctgtataaaagcaattcgtcttcttgccaataccttaaatttgaggtaacataaagatattagacgacggtcgacggactacggtcgattattaaaacctgatacagcggagcggaacatggtgatcaggcatctaaatggaggagaagattgtgcttattatactcgttatgtttcttctcgggattattctcgggtttatcggcgcggggggagccggttttgtcattgcacttttaactatactgtttcacgtaccgattcatacggctttaggcacctccctcgccggaatggctttcacaagtttatcgggggctttcagccactaccgtgaaggcaatattcagatgaagatcggtctcatcgtcggcgtttttgcggcattcggttcgtttttcggggcaaggcttacttcccttatccccgcagatttgctgcattacttgacggcgggcatgctgtttttatctgctctgcttattttagtccggttatttattgtaaaagaaacacaagaagattccggacggcaaagcaatctgaacatatgggtgaaagccgttgtactcggtgtcatcgcaggaatcttgtccggaacgttcgggatcggctctgcccctttcatccaaatcggcttaatgattcttttgcgcttatccatccgccagtcggtcggcaccaccatgcttgtcattatcccgcttgcggtcggcggaggactcggttatgtgacggaaggatttgtcgattatatgctgttggtcaaagtgctgatcggaacgatgtgcggcgcatatgtcggagcgaaattcaccaacctcgtgccgaaaatcattctgaaatcagccatctttttaacaccggccatcgccggtctcatgcttttattttaaactgaaacgggaggcggccgcctcccgttttttctgttcttcatctgttttcgaagagctttttcagctttgcttccgtttcggtatgatctaccggtgtatacacactgcagcgcagatcactgttgccctgaacctgaaatgaagtcaggttaaagaccatttttcccgccttcgcgtggcggaactcaattaatacttcgggtgccgagctgacttcgctctcattccacagcgtatgaaattccgaatacgttttctccatttcttctataaactgagaataccacgtatcagctacatactggccgtaatacgttctgaaaatggcgatgaatcctttcacaaagtgctcccagttcacggctaaacttcttaattcttttctggaaaacaatagctctatgagattccgcttttcaggaggaatttgttcaaaatctaaaaacacgtgcgccgcagcctggttccaccctacgatatgacaccgcctgtccgagataatggtgggacaataacggagctcctgcaggatttttgaaagggacgggctgataaccgcttcttcctccgcggtaaacggctgcttcacgccctcctcaatggcaagcgcgtataaataatttctctcatctttgttcagctgcagcgcatcggaaacggcgtccaatacggctgcggacactttaatgtctctgccctgctccagccacgtataccacgtggtgcttacgccggctaattgcgcgacctcttctcttcggagtccgggcgttcttctccgtgtgcccatcggaagcccggccatctgcggagaaattttggcccgctgcgtttttaaaaactctgagagcgcctgcaatcttccttctggtatcataccgaatctctcctctcttaccctggtatttattatactaggataatcaacaacttgtaataggataattgcgagttacaataaatacataccgaaggaggaatgaccatgaaaagagttgtgatcaccggaatgggagtgatttcacctctcggcaatgatgtgcatacattttggaaacacctgacggaaggaaaatcgggaatctctttcatcgattcgtttgatgtctccggctccaagacaaaaatagccggtaccgtccgtgattttgacgcagaagaaagatggggcagaaaagaagcgagacggcttgaccgtttcagccagtttgctttagctgcagcggaacaggcgcttgaaagctccgggattcagctcgatcagattgaccgtgaacgcctcggcgtgtacgtcggctcgggaatcggcggcatcacgactttgattgataacgttcatactttaaatgaacggggagcgcgaaaagtgagcccaagccttgtccccatgatgatctcaaatgcggccgccgctcaaatcagcatcagattaggcgcgctcggcccctcactttctcccgtcaccgcgtgttccatcggcaatacgtcgatcggggaagcattcaacgccattcggaatgatgacgcagatatcatgtttgccgggggagcggaagcggcgattacgaatttgtcattagccagcttcggcaatgcccacgcgctgtcagcgagaaacgaagaccccgccgctgcaagccgtccgtttgacgcggatcgtgatggatttgtcatgagtgaaggcgcgggcatcttagtattggaatcattggatagcgcaatcggcagaaatgccccgatcctttgtgaggtgctcggctacggtgcgagctctgacgcctatcatatggtggcctcccatccggaaggaacgggcgcatacctggcgatgaaaaacgctttgaaaaaggcgaatgtttcagcggaagacattgatgtcgtaagcgcccatgcgacaagcacaaaagccggagatctttctgaaacattggccatcaagacattattcggggagcttgcgtatgatattccggttacggccaacaaatcaatgctcggccacatgcttggcgcggcaggcggcgttgaagccatcgctctgacagaaagcctgagacacggcatcatcccgccgacgatcaatctgcagcaccctgattcggcatgtgatttggactatgtagcagacgggccccgccagcaatcgttaacgatcggcctttccaactcattcggctttggcgggcataattcggcgatcgtgctgaagacatatgaataacgggcatcaaaaaaaggagtgaatcatttcactccttttttgctttctccggttttgttgttaaggcgaaaaaagcgatggaaccgataacggatgtcgtgaacataattgcccccatcggcacggccgtcgcttcattcatccccacaagcggcgacacgatggaaccgagaagaagcggaagcatgccgagcagtgcgcttgcgcttcccgcgcggtgtccctgcttttccatcgccaatgtaaaggtgcttgtcagcgtcatgccgatcgtaatcatataaatgaaaattgaaatcaccagtgccgccagcggtccgtgaatgatcgtcatgacgagcagaacggcagtcgccgtcatcgctgtaatcacgccgattctcaacaggcttttttcgtgaatgatcccgccgaaacgcccgatgataaagcttccggtaatgatcgccagaccgtttatgccgaataaaacactgaatacctgaggcgatactccgtaaatatcctgatacacgaaaggcgttcctgagacatacgcaaagctcccgccgtgaataaaaccgaccgtcagcgcatagccgataaatgaccgatccttcagcaggcttcccattgtccgcacggaatttccgatggagctcggaatccgcttttccggcggcagggtttctgtcagcttgagcgcaatgatgagaacaagcaaaaacccgataaaagttaaaaacagaaaaatcgtatgccatgatgcaaacggaagcaataaaatcgcgcctcccgtcatcggcgccaccatcggcgcgacggcggtaataaccatcagcagcgagaaaaatttagaaagctctcttcccgtaaacacatctctgacgattgcacgggataaaacgagtcctgccgaagcggtgaatccttgaagaaaacgggcaatcaccagtgttgaaatgttcggtgcaagcgcgcaaaacagagaaaacaaagcaaataaaaaaatacatagcaataacggttttcttcttcccttcgcgtcacttaacgggccgacaacaacctgtccgattgtcagtccgatcagacaagcggttaaactgagctggacaagcgaagcgcgggcgcttaaatcttcggcgatttcagggaagctcggcagatacatatctatattgagcggccccagtatcgcaagcattccgagtagaaaagccagcgcaagccgctccttaccggtcggattatgcagcatatcgttcccacctttcctttgtcaatctctcaaaacatttgtatattgtatcataattttttctttatttttaaaagttttcaaagggcataaaaaaaaccaagggctgtaacagcccttggttccggatcacgcggtaaaaggttttacgcgtgtttttctttaaatgcttttgcgtattgatcagccgctataatggcgtccgccacgtcgtcagccgtcacgtcaaaagcggcatgaatcgtttcttcttcaatcgtcgcggcttctgccactttcataatgtcctctttagatgcgtctttcaatttgatgtcttcaagtgtgacaggcagccctaagctgatataaaacgcgatataccgctcaatttcctcaagcgaacgtttttccagcgccaattgaacaagcgtgccgaatgccactttttcaccatgggtcaagtgatggatttcaccttcaagcgcggtaaatccgttatgaatggcatgtgccgcagctaagccgccgctttcaaatcccagtccgctcagaagtgtattggcttcaaccaccgcttccaatgcgggtgtaacggctttcgctttcacagactcataagcgagacggccgtatttgaataataccgcttcacatttttccgcgatagcctctccggcgattgtcggaattccgcctgccatcgttttaccgccattggcgatgacactgcgcgcctctatccacgtcgccatcgcatcggcaatccctgacgctaaaaagcgcggcggagcttccgcgacgattttcgtatcgaccagaaccaagtcaggattcttatgataaaaacgatagttttcgaacgcaccttgttcagaatacacgacagacagcccgcttgtcggagcatccgttgaagcggccgtcggcacgataacggtgtagccgtttatttcatctgatacggctttggccgtatcaagcgttttaccgccgccgactccgatgacaatagtcgcccctgctttttctgcgatgccggcaattcttttcatttcttcctgggaggcttcgccgttgaaaaccgcttcttcagaagaaatattgcttttctttaattcagccgtcactttatggcccgcgatatcccatacggttttgtccgcgatgacgacggctttttcaccaacgccctccagatgtccgccgattgtttcaatggcgttttttccctgcacgtatttggccggactgataaaaattcgttccaatgtcatcatcccttcttcgttgtctctcattacatttctcttattgatagagcagaaatgaaaactcttctgatatcattcctcgttttgatttgattcaaacctcatatacactgcagaaaaatcaattttcacggcattgacaagatgtgaaggtgtctatataatcttcgatattgaagctgatcattctttactgaatgaacaaacgagattgtgaatgattcgtcttaaaaattatttagttctgctggataatttttgaggcgtttttgttttttatatatttttgactgcggaggaggtttgcatatgaagaacatttgcaaggatatactgatgattatggccggagcctttcttatcgcggcgtccgtggaatttttcgtcatcccgaatcatttaggggacggcagcaccgtgggaatcgctctcgttttatattatcttttccatatacctgcaagtattacgactctggttgtaaatttgatttttatcgggttggcttataaatttttaacgaaaaaaacgattttatacacgatactcggtacgggaatgacttctgtttttctcagcatcgtcagctttattccattcggcgtgcacgacatggtgctcgggatcgtattcggcgctctgctgatgggagcggggctggcattgatctttatcgctgacggatctaccggcgggaccacgcttttggcgtatttattgaattacacaaagggctttaacatctccaaaagcatgttttatatggattgtgtcatcattttcgcatccgttttagcgatcggaatcaatcatatgctgtatacgtttatattcgtttatctgtgcgccaaaatcgtcgatattgtcattgagggtttccataataaaaaagccctcaccattatgtctgaccaatacgaagaaatcgccaaagccatcacctccgagtacggcaacgcggcgacgattttttacggatacgggtattacggcagcaaagacaagcgcattatctatgttgtcattaaaaagaacgaattgctgaaaatcaaaaaacatgttcaaaaaattgatccgaaatcatttatcgttattcatgaagtaaaagaagctgtcggagggcaattcgggtttacaaacctgcccgccgcaaatgaaaaataaccgcctgcagtgtatagctgcaggctttttttattcgtctctgccccgcttaaaggtttttacatctttcaatcgaagtagtaaatgaaaccttttttgatggaggaacataaaaaatgaatatcaaaactgacaggctcgtaattcggacatttgaaccggaagattggcaggatgtctatgcgtacacctcaaattcgaatgtcatgaaatatataccagagggtgcctttaccgaagaagatgccaggaaattcgttactgaaaacagcggtgaacatgccgggaagtttcccgttttattgaaggatgagaaaacggtcattggccacattgctttttttcagtattttggcgatcatacgtatgaaatcggctgggtgtttcacccggaataccagggcaaaggatatgcttcagaggcggcgcgcgccgtgctggcattcgggtttaacaagatgaaattacaccggatcattgcgacatgtcagccggaaaatatggcttcgcaccgggtgatggaaaagatcgggatgagacgggaaggcttttttaaaaaatgcattccccatgataatgaatggtgggacgaatattattatgccgttttagaagaagaatgggaagtctccaatctggaataaaaaggcttataccctttgcttttacagataagtgtgtgctacactgtttgtaacaaatacgaagggatgatgggtggacaatgattaactaatcttattttgaccgtttgaaatcaaatatttcaaatcagaaaaaataggattagtctgcccattttctatacgatacgaaagctatgtaaaaatagcttatttgatcatgcacaggtacggctaatccttccaaatcaattgggaggatttttttggtcctccctttaaagcgagggattgacatatgaaagaaatgttaaaaataagcggcatcagttatgaaatcaacagcgttcccctttttgaacaaatcagcgcgagcgttcagcaaggtgacatcatcggcgttatcggtaaaaacggcgccggcaaatcgttattgctgcaattgatctgcaatcaaaaagcgccgtcacaaggacagatccagatgacgcaagatgtgaacatatatatggtggaacaagaaacagaagcttatgattccggccatccggagcctgcggaggcagccttgttagaaaagtggaacgtacccgcacgcgccttttcgcaattaagcggcggagaaaaaatgaaagcccgtcttgccaaaggtttctcctcctcaagcagccttttgttattagatgagccgacgaaccacctcgatcagcacagtttggaaatactgctaaatcagatcaagaattacaaaggcaccattattttcgtttcgcatgatcgtgcttttatagatgcagcggcgacaaaaatctgggccatcgaaggaaggaaactcattgaacataaagggaattattcaagctatatggaggtccgcaaacagagaagactgacacagcagcgcgaatatgagaatcagcagaatatggtcaaaaggattgaagctcaaatgaacgagctgagcgcctggtcaaaaaaagcccacgcccaatcaacgaaaatagaagggtttaaagaataccatcgcgtaaaagcaaaacgcacggacgcccagattaaatcaaagcagaagcgccttgaaaaagagcttgaaaaagcgaaagcagaaccggttgaagcggagtatgaagtccgtttttccattgagcaccgcaaaaaagcgggaaagcgttttttagaagtaagggatgccgcaaagtcatatgacggacgaacgctttttaaaaacgtgaatttcactgtgatgcacggtgaaaagatcgcgattacaggcccgaacggcagcgggaaaacaacattattgaaggtcatcctcggtcaggaaaaagcgcagggcggcatatggatttctccgtctgcaaacgtcggatatttaacccaggaagtattcgaccttccgcttgataaaacccccgaacagcttttttacaaagaaacgttcgaagcaaggggaaatgttcaatccctcatgaagcatttaggatttaccgcgccgcaatggacggaacccatcggcaagatgagcatgggagagcgggtcaaatgcaaactgatggcgtttattctggaggagaaagatgtgctgattctggatgagccgacaaaccaccttgatctgccgtcacgcgagcagcttgaagacactttggcccgatacgacggaacgctcatcatcgtatctcatgatcgttactttgtcgaaaagacgacggacatccggcttgatatctcaaacggcagcgtccgaaaacaatggaaagaatctccctccgtcagggacgatgctgaagaactgcgattgaagcttgaaaccgaacggcaggaagtcctcggaaaactcagcttcatgactccggctgataaacaatatcgtgagcttgatcaaaaattcaaagagctgacggaagaaataaagaaattgaaatgaatgaaaaacccgtgattgtcacgggttttgttttggaaagctcacgtatcatgaagaataatttcaaactgatttgtacaacctacgttcagattaattatgagcatggttcagggggggcgaagaatggccaaacgcatcggaattacgggaaacattatggctgatcaatccggccctttcccgggttataatcgggcatatgtcaataatgattatattcagtctgtttctgaggccggcggtgtgccgtttatattgccggtgattcaagagacggcgcttttaaaggaacaggtctctcatgttgacggcatcattctgtccggcggccaggatatagacccgctgttttacggcgaagaacctttacaggctttaagaaagacctttcctgatcgggatgcctacgagaaggagctgattctcacggcggttgctttaaaaaagccgattctggctatctgccgggggatgcatatgttaaacgtcacttacgggggaactttatatcaagacctgacacacgcttcgtttgctgacattaagcacgatcaagaaaaagatccgccgttaaaaacccatcatgtttcttttgaaaaagggacacgtctccattccttgtttggcgattcagcgcgggtgaattcattccatcaccagatcataaaagagacggcgccttcgtttaaagccgcggcttatgcgaaagacggggccattgaagcgattgaacggacgggtgaattatttgtcgtcggcgtgcaatggcatcccgaaatgctgacaaaaaagcacgaagacatgaaaaagcttttttccctttttatgaatgcggtcagaacataaaaaaaagcagatcataacgatctgctttttcattttattcttccggtttctccggtgttttgccttgtgtcagcttatggccttcgatatccacgttcggaatgattttatccagccacttcggcaagtaccaggccgcatgtcccatcagcttcatgacactcggaatgatggtcattcttacaatgaacgcatcgaaaagaacaccgaaggtcattgccaatcccatggatttgatcgtagagtcccccgcgaagatgaatccagcaaagacgaaaatcatgatcagtcccgccgctgttacgacaggtccgctatgtttcaatccggcatggatggcttgtaccggattttttgttttgacatattcttctctcattctgctgacaaggaatacttgatagtccatcgccagcccgaaaagaataccgatggctaaaataggcaggaaggcgagaatcggacctttttccggaatgctgagcaagccggtgaaattcccatcctgcagaacgaataccgataacccgagtgtagcggtcatcgtcagcaaaaagccgacgacggcggcaagcggcacgagaagcgagcggaaaacaacggtcagcaatacaaacgcaaacccgacaatgagaatggcgaattccggaatcgcatcatttaaccggtctgaaatatcaatattcaccgctgttgacccggtgacgagcaggcggatgccgtttttgtctgatcgtttccgtatatcctgcactaactctttcgttgccttatcattcggcccggtttcaggcactgccgtaatgatggcataatcccctttttgattcggcatggcaggtgtgacgctcgccacattgtgcaagtcctttatttctttcacggcgtcttgaaatgcttcacttttgttccccttgaccccttttgcatcggcaacaattgtcagcttgccgttaaagccttcgccgaatcctttagacaacagatcataggcgcggcggtccgggctgtctttcgctttcattcccgcatcaggcagccccagctctaaatgcatggccggcagactgatgacggctaaaagaataatgctgaaaatgcttaacagaataggcttctttgtaacgaagcgcccccaggcattcgtgtcggcgcttttcttttctttcttcttgtttgatttcggaatcatccgttttcctgcgattgacaacaccgcaggcaccagcgttactgaagccaatacagccatcagcacactgagtgccgcagtcaatcccatggcagacatgaacggaatgccgacaacagtcaatccgcaaagcgcgacgatcacggttagtcccgcaaaaacgacggcgctgccagccgttcccgcagccttagcgatcgattcatttttttgtacaccttcgcccaaaaactgacgatgcttcgtaaagataaacagcgcataatcaatcccgacggccaggccgatcattccggataatgagagactgaccgaggctattgtaaagacctgtgttccgattaacgtcagcgcgacgcttacgcctaacccaatcagggctgtgacaatcggcagccccgctataactaatgaaccaaacgtaatggccagaacgacgaaagccagcacaacgccgacaatttcagagacaccgccgacttcaacaccggcccccggcacatcaccgctgagctccgtctgcaggcccttgtctccggcggcggacagactgtgtttaatatgtgaaacagacgcctccgtaatgtcatccgccgcttttttgtacgtaatatcggcatatgccactgatccgtctttagaaatggttcctgtctcaaaaggacttgcaatcgaagcgactgaatgatctgttttgatcttctttaatgtctcttcaatcgcttgtttttccggttttgacgtcaatttcttcccgtcttcagctccgaaaataacccgtatgcttcctttatcgggcccctttgaaaattctttttgaatcacatccatcgccttttcagaaggtgtgtcgggaattgacatatcctcagaaaaagcaggttttaacgagatggcgatcacaatcgaagcgatcagtatcacgagccacgcactgatcattttgaatcggttgcgggcagaccatccccctaatttatataaaaaaccagacatcgaatactcctctccaatcattactttctgcctaattgtagttcacattcacataaaaaaaacgtacataggggcatgtacgtttgggcagtttttcattatatattcagtttcagaatgcctttttgcatggcaatggtgacggcttccgtccgcgaatcagcgcctaatttgttataaatcgatgttaatctcgcttttaccgtccgctctgagattcctaaatcgaaggcgatcgctttgcttttatgtcctttcgcaacggcttgcagaactatgatttccttgtccgtcaactgtgtttcattggcatttgcccgttccattttcatttcccggaaacgccgcaagatgtccggctgcagaagcacttctcccctcaccgccgcatccatcgtatgaaataaggtttctgagcttgtgtccttcagcagataaccgttcgcgcctgattcaatgccttctatcatcagatgatcttcattataggtcgtcaaaataatgatcggcacatcagaatgctcttttatctgtttaatggcttccagcccgctcatttccggcatgtacagatccatgagaatgacatcgggctttagttcctctgcgaggcggacggcggttttcccgttttccgcctctcccgttatggtgtaatggtcatttgtttctatcaaaagcttcagaccttctctgacgacaagatggtcatctgctattaacactttatacatgttccgcttctccttgaattggtatgatgatctcaatttgagttcccgctgatctggcgcttgttatacggaaagtgccattcatcatattgacgcgttcttgtatcccaagcagcccgtaatgtccgctttttctcatttctgttccggcatcaaagcctttcccgtcatctttgacggttatgcggatctgtccctcttcttcctgaacggacacccagacattcttggcttctgcatgcttggcggcgtttgtcaggccttctccgatcatgtaatggcaattctccgccgtatgaacgtcaagcacatgatgcacgctgtaatctaaaaaacaagacagcccggaggcttctgtaaaatggttgatttgttcagtgatgctttcttttaagaacccgatctcttctgatttgctgcgaaggttgtcaatggccgagcgcgcatcagccaatgtgcccttcactctgtccattgactggctgatgatgtctttcgccctgtcagtgttaccctttgaaagatgaacatgtaccgcttcaagctgcatatgcaagctgaccagcccttgtgcaagcgtatcgtgcaagtctctcgccatccgctgcctttcattctgaagcgtcagctgtttcacttgccgatgagcgagttctaatttttcaagcgtcatctgtgtttttattttttcatcaacttgcgcgaaaaatgttgccgcatacgtgataatcacgatcatgatgggagcggcgataacgatgaaacgaagcagatgatgcggatgctcctggtgcagggctgctatggacattaaaatgaaaagatagagtatgagcagcgttttgcccttatccgccattccgataatctgcccgattaaaaaggcatagagaccgatgaccgccgcgatatagcccccggtcatcaagttagccgatgtatatatgataaatccctgtatgatgaaataaagaaacgtttttttcttgacccagcgataggaatgccagtgcagcacggcaaaaatgacgatcaatatcgtgaataacagcagcaataaaaccgtccagctttcataaatgtactgcaaagagactgatgcggcatataccataaaaataaacgccagaccgggcacccgaagcgcaagcatatgcaatgagcgtctgtcacgggagacatagtcttcttgatgttttgtaccaaacaatctctgtccacttccttttagccgaccggcctcacgatgttttattctatttgtcatcataccataagtgcctgcttctcaccttccccttctgtcctgcatgacgggtgaaagaaaaaacagcctgcgggattggttatatatgggcttgcgttcggctcattgatcggcctgttaagcgccagccggatgatctcgcggaagggaaccaggttcgttgccccggtcagcgttctgtttgttatcactgggatatttgtcatcagcgcaggttgtttttccgctttcaaaagcatcgtgtttgccggacttatcatcttcgggattaggcttcctctttttttgatgtaccgtcagatttcttctctcttttttcttataaacaaaatttgtaagactagagctcttttctcaggggaaattaattatgtaattgagaagaggaggtttaagacgattatggaaaagcgtgaattagcggctcacgagtcgcttgacttacatgaaatgattaacttcaagacgctttgtgtagcgaaatccaagctcatgcaagggcttgtgtttgatcaggatctgaaaacgttaatggagaaagatgttcagcaagcctcgcaagacctggctgatctgcaggcggtttatgaacgggcatcttttcaggctcctgttcctcaaaaccggccgacttcgatcatcaattgaaaggaaggtaagcatcgttgaatcatgaccatttagatccaatcaattcattacacgtccctgaactcgcagatatgacattcgcaatggattttctcataagggcaaaagaaggcgtcagaaataccgccgtcgctttgacagaaaccgcttcacctgatgtaagagctttgctgcgcaaacagctcatgcagggaatcgcgatgcatcaggaaattacagacttgatggtcagcaaaaagtggtttcacccgcatgatctgagcgaacagtataaactggaccagctctctgcgaaaaataccctcatggtcggaaacatgaatctgtttcccgttgaaacgaacagaaaagggatgtttgaccgcacacctgatgaacactaacactggaggtattacagcatgaaggccgtaacgtatcaaggagtgaaaaacgtcgtagtcaaagacgtgcctgatccgaagattgaaaaacacgatgacatgattataaaagtcacaagtacggcaatttgcggatcagatttacatttaatccacggactcatcccgaacttgcaggaagactacatcatcgggcatgaaccgatgggcatcgtggaagaaaccggtcccggcgtgacgaaagtcaaaaaaggcgaccgcgtcattattccttttaatatcgcctgcggagaatgcacttattgtaaaaatcacttggaaagccaatgtgatcaatcaaatgaaaacggcgatatgggcgcttatttcggctattcagggagtaccggcggctatcctggcggccaggccgaatatttgcgcgtcccttttgcgaactttacccattttaaagtccccgaaacatgcgaagaaccggatgagaaattgagtgttattgccgatgcgatgacaaccggtttttggagcgttgacaatgccggcgtaaaagcaggcgatacggtcatcgttctcggctgcgggcccgtgggccttttcgctcaaaaattctgctggttaaagggagcgaaacgcgtaatagccgtagactatgttaactaccgtctccagcatgcgaaacggacgaataaagtggaaatcgtgaacttcgaagaccacgaaaatacgggcagctacctgaaggaaatcaccaaaggcggcgccgacgttgtcattgacgccgtcggcatggacggaaaaatgacagatcttgagttcctcgccagcggattaaaacttcaaggcggggcgatgagcgcattggtcatcgcgtcccaagccgtgcgaaaaggcggaacgatccagattacgggtgtgtacggcggcagatacaacgggtttccccttggcgatatcatgcagcgaaacgtcaatatccgatccggacaagctccggttatccattatatgccgtatatgtttgaactggtgtcaaccggcaaaattgatccgggcgatgttgtaagccatgtcattccgcttagtgaagcgaagcacggctatgagatgtttgacacgaaaacagatgattgtattaaagttgtactcaaaccttagagaacggaggctacagaaatggccagcgccttacatgaattactcgaaattcaggagatggcttcttttaagtcactttgcctgacgaaatccaaaaccatgaaagcgctcgtatccgatccgcagctgaaagaaatcatgcagcaggatgcggatacatcaacaaggcaattgcaggaatttgcctcgattttatctgaggcaaagcatgaataggagatgaatgacgaatgaatccgattattgaatacttgacggggatggatgcactgacagaccaagttgtcgcaatggatttattgaattcggctaaaagcggagtcagaaactatgcgatggcggcgacggaagccggaacgcctgaagtgaaagcgatcctcacccgtcacttagaagaagccatcgacatgcatgagcaaatctcacgctatatgatagaaaaaggctggtatcatccgtggaacacagatgaacaagtccggtttaatttacaaaatattgatacggcgctccgcctgcccgtcctataaatcgttttgctgctgagacagcacccctgactcaagcttcagtatttcaaactgtgagctgccttttacagcgcccaggcggctctcagtttttttatgccttcttgtatatcggtttcagaaacccccgcgaaaccgagagaaactgttttttcagggacctgtttttgataggtaagagacacgggatagattttgacgccttgttcctccgccttttcaatcagctctttttcgctgaaaggcagatgaacgtcaagtaaaatccgcagcccggaattttctccgcgaatcctgacgtattgtcccagctcgcgccgcacggcctctaataataccgctctttttttccggtacagctttctcattctgttaatatgtttctgccactctccgcttttgataaattgagccagcgtcagctgactgtggcaggagacggtctgcttatataaagaagcgatttccctgcctttttcgataagcggcaaaggaagaatcatatagctgatgcgcagcgaaggaagcagagattgggaaaacgttcccatataaataacacggtgatgctgatcaagcccttgcaatgatgggatcggctggccggtgtatcggaattcaccgtcataatcatcttctataatgaacgattgatgttccttcgcccatttcagcagctgaatccttctgtttaccggcataatcattcctaacgtaaattgatgagaaggcgtgacatatacaagacgcggccgctcttcattcagcttccggatacagactccttcattatcgacgggtatcggaatgatcttcatgtgattggctttaaaaatctccctcgctctcggataacccggatcttcatatccgatggatagatttgcttcaaatattttgcacagcatttgcaaaagagcagggttcccggcgccgactatcacttgttcaggaagacaattcacgccgcgcgactgatataagtactccgaaatgagcgttctcagttcaagctcgcccaaatcatccccgggccgatacagctcatgcccgtattgatctaagcttgcaaccatacttttgcgccatgccgaaaacggaaaatgagcggcatccacagtgccgtagtgaaaatcaatccattggcggtcttccttcgcctttgtttgaacaggcgaagcgcccggctttttcacatagacggcgtccgagtcataatcggcaaaccatccgcttctcggcttactgacaatatagccttcggcggcaagctgttcataggcacgctccacagtcgtctgactgacggaaagctgacttgacaaaagcctttttgaaggaagcttcagtcctttaggaatacggccctgatgcatattttccttaaaatgccgataaagctgctgataaagcggaatatccagatctctatttaaaaatggcgtgatatccatttttactccctccaaactggcattcttctttttataaaaactggccatttgtatatggccaatttcagtttatagtcattataaactttgaaaatgggtttagaaatatatattggagtgattggaatgaataaggccgcaaacggctggattaacggatttatcggcgtgctcattttcagcggctcgcttcccgcgacccgcttggctgtagcggactttgatccggtatttctcaccgtatgccgcgccgcgatagccggtatattggcaggcgctctgctcctcatttttcgggagaaacgccctgccaaaagcgacatcatttcactactaacagtagcgctcggcgtcgtgatcggtttcccgctgcttacagcattagcgcttcagcatgtcacatccgctcatgccattgtctacatcgggcttctcccgcttgcgacagcgatcttcggcgtactgcgaggaggcgaacggcccaggccggtcttttggattttctcggctgccggcagcatcctcgtagccggatatgctctgctgcaaggaggggaatcctctccgctcggtgatacatacatgatcgcttcgattatcgtgtgcggtctcggttatgccgaaggcgcccgcctctcccggcggcttggcaactggcaggtgatctcttgggctctcgttttatcgcttccccttatgttcatcctgtctttctgcttcatgccggactcatggtcaaacatcggcgcgcccgcactgctcagtcttgcatatgtctcaatattcagcatgctgatcggcttcgtattctggtatcgcggactcgcccagggaggcatcgccgcggtcggacagctgcagcttctgcagcctttcttcggactgttactggccgccatgattctccatgaaaaagcaggatgggaacttgcggcggtgaatgccggcgttatcgcttgcgtggcggccgcccggcggttcgcaaatcaatcagaaaaggccgaacaatgaacttgttcggctttttcattatattccgcccataggcagcagaagtctgtatctctttcacatgatccggctatttttcaggcaggctgaactcccttaaacgcactcatcaccagatcatgcacataggaatcattcacctcatcacctgtaataagcagacgatagaaaatcggtccgtaaatgagatcgatgcttacgtcaatatcaagattctctcttaattcacctttttgaattcccttttccagaaggcctttcgcttggaggcggcggggcttgaaaaatcgcgtgcgatattcttccgccaattttgcatccagctgccccgcaccgattaattccttaataacggttccttcccggctcgtcaaaaaccttgctaaattcgtggcgtgggtcaatatatcttgcactgttaatcctgtatcgggcacaggcagtctgtccgtagcggtcgaaagaaagctgtccatgataacggcagccttgtttgaccaccatttataaatcgttgccttacttactttggcacgctcagcaattttatcgactgtcaccgcgtcaaagccattttccaacaataggtcatacgctgcagaaagaatcgccttatgtgttccttcatcgcgcggccgtcctcgtttactctgcacatgaatcattccttcccgaattataaacgatacgttcagtatacttaacctttttaaaaaaagaaaacagaaacctatttacaaaactgaacgtttagtatattattttcttataaaaaaactaaacgtttagtttacaaaataacttgagggaaatcttgatgaaacatagactccaaaagcctctgcgtaaaggagatgaatcagcaaatcatttatcaagcatcataaaaaccacttaaaaaggagttcattcatatggctaaagaaaacaaacagacagcagatcagggaatttcagctggtttaacccttctactcgcaactgcatgcggaatcattgtcgctaatctttattatgcacagcccttggcaggaatcattagtgcggcaatcgggctttctccaagcagcgccggattgattgtcacactgactcaaatcggatacgttgccggcttactgtttctcgtccctttgggagacattatcgaaaacaaaaaacttgtcgttgtatcgctccttctaagcgcagccgctttgacactgacagcatttgcgaagcatggaacactgtttttagccgctgcgtttttcatcggactgggatccatcgcagcccaagtgctagttccgttcgcatcataccttgcaccggacgccgcacgcggccgggttgtcggcaatgtgatgagcggcctgctgctcggtattatgctttcccgtccgatatccagtctggtcgctgatatatgggggtggaatgccatatttgctttatccgccgcgttaagtgttgttctggcaatcgtcttatcaaaagtgcttcctgccagaaaaccaacagcaaacacaacctacaccgtcttactcggttcaatgtggaagctgctgcgcacgactccggtcttacgccgccgtgccatttatcatgcgtttgtatttggagctttcagcttgttctggacgactgtgcctttattattgtccggtcctgcttttcatttttctcaaaaggcaatcgcgctgtatgcattagcggggattgcaggtgcagcggctgcaccgataggcggccgtctggctgatcgcggcttgacccggcttgccaccggaatcgctcttggtgttgtcatcgtttctttattactcccgctcatgattcagagcagctcccccgtcggcatagcagttctggtggccgcagctatcctgttggatatgggtgtatctgccaatctggtactcagtcagcgtgctattttttcgttggcacctgaatttcgcagccgattaaacggattatttatggccatcttctttctgggcggcgctgtaggatcatcaatcggaggatgggcatacgcctcaggcgggtggagtatcacattatggattggaatcgcttttccggtcatcgcattgctttatttcaccacggagaaataagccattcaccaaaaataagccgtcagaaccaagctgacagctttttttgatgtattcttctttacatccatccgaacaaaaaatccggattcataaaaagatgatattgattctttacgccccgctcacatagcagaaacggtaaaaccatgtcataatatgttaagaaataattacgccataggcaggtgaaacacatgaagaagtatttatataaacaccttttgttagctctcgtttcgtccgtttgctatttattggtcttttatgtgggtttaaaattgacacaggaagacacaccgccgttgtcttcttacccgttttacctttttatttatctgtacatagcagccggatatttgacggtcggccttgttttagcttgtatgactgatatcttgaagaaccgctggacattcaataaaccgtctaccattctattgaaacttatcgtttacttactcataccgtatgctatttttcattctttcttcattttaatggcgccattgatttatgtgctgtttgagtcgttattcatcctgagaaaagcttcataacctgcgcatgctgccggtatgtttttaacatgcttgtcagttgttcgcagtgattcgtttgatgttttcttccatcaagccggaaatgagctgttcgtttgtatgaggaatctgtttgagctgttgtacgaccagcccttgtcttgcggctgaatgattttgactcagctttgctttcccctctattttgctgattttgattttaaaaccttttacccctttgttcatgcctgccagcaatttcgcatcgacatcctctaatttgtacgggctgtcggggctttcgtatttcaatacgagatcactcatcgattgcacggtttcttcctcatccaaaagctccgcctctccgtatacatgaaccgccacataattccatgtgggaacagcctgattcgtctcataccatttaggcgagatataacaatgaggcccttgaaaaacggctaacacgttttggccatcaatctctttccattgggggttcggcaatgcaaaatgaccgtataagcattcgttattcttactcatcatcaatggcaggtgggttgcatacggcatgccttccgccgttgaaaacaatgctgcgaaaccatactttttgattacatcgcacgcttcagcttcactcagctgaaatggagccggaatatacatacaaaactctcctctctgaacatggattgataaagcgctttccgctataataagatatcaactgacatttaaaaagatacagtttcaaacaaatacacatgtcagaggagaacatctgatgaaaaatatgattttcgctttcgaaagcggcaccccgaaatacaaacaaatttacgagcaatttaaaacattgattgagcagggaaatattcaggcagatgagcggctgccttccattcgcgagctggcggattccctgcgggtaagccgtaatacaacgctgatggcttatgatcttcttttagcggagggatacattcgcggagaaacacgcaaaggttattttgtaaatgaagtagaaccttctatatttcaaaaagaaaacgatgttgtttacgctgaaaaaaccgaatcaactcagccggtcctgactgatttttgcgccggagccgtcgatcaaaagcattttcctctgaaaacatggagaaaattatacaatcaagttttgacatcagagaaaagctttctgtacggcgaaccgttcggcgagagaggcctgcgtgaacaaattgccgcttatctcttggaatcccgcggggtgaaaacagatgcggattccattatcatcggcagcagcacccagcagatgctgatatatctcagccggattctgaaagaggatttttcgggaatgatcgttgaaaacccgggatttgacggtgccagagcggcatttcaatttcacgggctatctctggaaacgatgcctgtctatgaaaacggagctgatttttctcaattacatgcaatgaaagaaaaattaatctatgtgaccccatcccatcacagcccttacggcgtaagcatgtccattcagcagcgccaaactctgatcaattgggtgaatcatagagagggttatattctagaggatgattatgacagtgaattccgttatacacagcagccgtttcccgctcttgcttccattcaatcagaccgggtgatttatttagggaatttctcaaaatcctttcttccgggcatccgcataagctatatggttttgccgcagcgccttttgcgccggtataaagaacggtttattcatttcgaaggcaccgcttcttcgcttaaccagctgaccatggctgaattgatgaaggccggtgaatggacccgccatattaagcgcatgcgcattgtttacaggcgaaaaatgcagcacttgatttcacatgtaaagcagcagttcggcgatcatgtgacgatcatcggcgagcagtcgggattgtatatattggtgagagttcacctgaactatacagaagaaacattaatcgaacgcgcttttcagtacggagtgaaggtatatcctaccgccgtttatttcgttgccgaaaaacccgaaccgccgatcataaagctgggtttcgcccatctcgatacggatcagatcacacatggcgtacagcttttgagaaatgcttggctgtcatgaaagaaaaaaggcgccgaacggcgcctttttttatttcgtatttcttgtgaatttcggcagtccaaatatgatggcggcgatgccgcagattccgattaaaacgggatagaaagagtatggcaggatgctgacgggtgaaatattcccgaatttcccggctgataacagctgcgcgccgtaaggaatcaatccttgaatcatgcacgaaaagatatccagaatacttgccgattttctgttgtcgatgttgaatttatcagcgatattctttgcaatcggcccggctgcgataatcgagatcgtattattggccgcagccagattcgtcacgctgaccagtccggcaatgccggcttcggcgccttttttcgaacggattcgtttcgtgatgaactccagtaaaaagtcgatcccgccgttttgtttcatcacgccgaccatcccgccgatcagcatggacaggatgatcagatcgctcattccggcaattccctccgtaatcgccttaaaataagaatcaaacgtaaggctgccgcacgctaaccctatgattcccgtcaaaatcaatccgccgaatatgacagccatcacattaataccgattaacgcaaaaaccaacacggcgatataaggaagcaccttaatccagctgtaagatgcagttcccgtatggacggcgtggcctgccggaataaaaaataagataataacagtcacaatggcagcgggcaaaacaatcagaaagttcgttttgaatttatccctcatttgtgttttttgcgtccggactgccgcgatggtcgtatcggaaataaaagaaagattatctccgaacatagctccgccgaccacagccgcaatcggaatcgcggcggagatgccaagctcgccgctcaaacccgcgctgatcggcgcaaccgccgcaatcgtgcccattgatgttcccatcgatatagaaataaaacaagcaatgataaacagccccggcagcaaaaactgctgcggaataacgctcaaagcaagattgacagttgaatgcaccgctcccatcgcttcagccgctgaagcaaaggcacctgccaatataaaaatcataaccataatgataatatcaggatgtcccgcaccggaagcgaaccattctattttttgattgagcgatttcttccggttaaataacagcgcaaaagctgacgcaatgatcgcggcaatcaagatcggcaatttataaaaatctccggtcaccagaccagagccgacaaaaagccctacgaataagactaaaggcaataacgcccaagggttctttttattgttcatctgggtaaaccacctcttttcagcattaaagtcgctaatcacagtctaagcaacatttcacactttaaaagtctgcagtaaaaaagtcaagctgaaaaaaggataagtaatgattgataagatagaaaaggctgttttgtttccactctttagaaaataaaaaaaccaaggctcgtttcccttggtacatttcatgcggccccgcgtccgggacaccttctcttcattcagaaatacattcagctttcaatctgtttttaagtttcgcttcattttcaaggatatcttcgtaatcctcaatcttcctgtttaatcgttttatggtttcatcaatttccctctgtttctccgtcagccttttcctttcatttataaggatgttttttcggggttcgattgtatgatcggctccttcaataaataaagcggtatattcaatcagcgcctcaatcgacagcccggcacttctcatgcattttataaattgaatccaattcacatcatcttcgtcataatcgcggatgccgctttcatcgcgttttaccggaggaatcagtcctatactttcataatacctaagcgttgcggctgataactcaacctgctttgcagcctgcgcaatcttcatatttttaccacccgtccttcatacctttcataagcgtgccattatagaatatcatttcataaaaaaataaaccaaactccttgacttaaagtccgctttaacatttaaagtaaaatcgaacagaggattcatcactttatcttggaaaggaagataaccatgtgcaataatcatccgactcgtgtattaagcgctccgcatgcaaaagctaaatttgagcggacaacgattgagagaagagcattacggccgcacgatatcctgattgatattaagtacagcgggatttgtcactcagacatccacagtgcattcgatgaatggggcggcggaatctttccgatggttcccggacacgaaattgccggagttgtggaagccgtgggtgaagaagtcaccacatttgccgtcggcgaccgtgtgggtgtcggctgttttgtagactcctgcggggaatgtgaatactgcctgaacggagacgaacaatattgcacaaaaggcgttgttcagacttataataacctggactacgacggaaaccctacgtacggcggctacagccagaaaatagttgtcactgacagattcgttgtccggattccggatcagctggatttggatgctgccagcccgctattgtgcgcgggcattaccacctattctccgctgaaacactggaatgccggccccggcaaaaaagtggcgattgtcggaatgggcgggcttggacatttagccgttcaattcgcgcacgctttaggcgcagaggtcaccgtcctcagccgctcaatgaacaaaaaagacgaagcgcttgaatttggagccgatcattactttgcaacaagcgatccggatacatttactgagctggccggacgatttgatcttattttaaatacagtatccgcgaaccttgacgtagatgcctacttatccctgcttcgcattgacggtacattggtaaatgtgggagcgcccgctaagccggactcatacagtgtgttctccttaatcacgggccgccgcagcattgcgggttcactcgtcggcggtattccgcagactcaggaaatgcttgatttcgccgccgagcacggcattgctcctaaaattgaagtgataccggccaatcaagttgacgaagcgtacgaacgggttctccaaagcgatgtccgctaccgtttcgtcattgatatttcaactttataatcgacataaaaaacataccaatatttgttggtatgtttttttcagttcaaattattttttatttcagcagccaaccgggcaccgcttttatataaaccaattcgcctatcaattcaacaatcgtctgtgtgacgattacagcggcggctaatgaggcccaagcatccggcaaagccagcgctaacggaaggactgcgagagaatttcttgtgcccgtgctgaagatcaatgctcttccttcacctgtatccagacggaacgcatatgcgataagccgggagacaaacggcataatgagcaggaataacagatagatcggaatcacacgtataatgatttcagcatcactgatgacctttccgatttgtgtggcgacgaccgccagtaagaccagagccataaaaggaacaggcagccacgccgtccattccaacaccttttctcccgccggcttcttatcagcccataattgagtcatcaccgccgccagcagcggcactgctattaacaataagaatgcttccagaaacggtcccgcatgaacagcccctatcacttctttcccgataaacagccacaggtataacggaagcaataccatctgaacggcgaacaaaaccggcgtggaagccagtattaatctctcatttcctttgccgagctgagtaaagacgatgacgtaatcaatacaaggtgtaagcaataccaaacaaacccctaataatataggaggagattgaggaaaaatggcggttaacacccatacaacgacaggtacagctaagaaattaccgatcaataaagccgccataaacttgaggtttgacatggcttccttcagcttcaagaatgggatttgggcaaacatggcatacatgagaacagcgataagcggtgatatcgtccatccccagcgaagtcctgaatctttcccggcgatccccgctattccgccgattacaagagtcacaccatatatccaaatttgctgattttctaatgtctctctggttattttcattggctgacacctcttctccgcccattataccttcttttctgccgctcttgcattatggttctgccggaattaaaaaacaccaagggtctgtgacacttggtgttttttggaacgcggccgagaaaaacgggttgaaaaccgttaatcgtttgtaaataacccccaaaaagtatttttgacatactgttccttatcgaataaaagcattctctttcatttccaaagcatcatccagccatctcgggtgcatcggcaagagatgttcaggtaattcatggatatcaaaatatctgatttccatggcttcctcagtggactttttcaaagtgccgccgatgacgtcacattgaaaacaattggtaataaaatggctgactctgccgtcagggtatataaaggtttgtgaactcggatcagaataaacgcctatcattttagagactttcaccactaatccagtttcctcttctatttctcttataattgcttgttcaactgtttcaccaggttccacatgtcctgaaggaatgccccataaaccattatcagcacgcttcattaataaaacggaacttgattctttaattataattccagcgactccggctttcacttgttctgtccattggaaatccggttttttccgtacttctgcctttatttcattatcgaacaagtctttcagatcgcggatcacaacatccggatttctaaaatcatgttttgcaggaaataaagtattttgttcagaaactaatacggaagtgatgcctatttggtttgctccgacaatatctgtttcaggcgtatccccaatcataacgcatctctctttatcttcaaaagactcgagtactttttcaaatattgaagacgccggttttccaattataatcggctctttagcagctgctgttttaacagccgcgactatagcgcctgtcgcgggagctggtccgttagtggcaggaaatgttttatccccgtttgcagcgataaatgaagccccgcagcggatgaggtttactgccttatgcacatcctgaaatgtaatattttgatcccagccaatgacaacagcctccgcctgatcttccgtaagatcaataccggccttttgaatttcacttttaagttggtcatttcccaatatatatgccttctttattccttcactgacaaggtaatcagctgttgcccaccccgcagtaaacacttcatcaatacttgctgaaatccccagtttatgaaggcgtttcacaatcgtttctcttgtaacacaaggatcattcgttaaaaagcgaatggctttcttttcttcacggagtcgttttaaagaggccacagctcctggtaaagctttatctcctatatatatcactccgtctaaatcaaataaaaatacatcataattctcggagatcatcataacactccttaagcggttgtctcttggttaatagttgagcgatacgcaaaatgatttgtagggccttgtcctttcccgattcctaagggatgtttaatggctgctgaaatgaattcctttccagttgccactgattccggtatgctgtgctgctttgccagctctgcagttatcacagctgaaaacgtacagcctgttccatgagtatgctttgtgtcaaagcggggagaaacaaattcctcgaagtcctcgtcaaagtacaaaatatcacgggcttctccgttcaggtgccccccttttacgacagcactttttgccccgtatacctccactatttctttcgccgcatcacgcatctgctgtacagtctcgattgatttgccgatgattacttccgcttccggaatgttcggtgtaataacagttgtttggggtattaataatttcttcaaatgattaatggcgtccttatggagcagatgatgtccgcttttagcaatcataaccggatccatcacatacgattgaatatttgcgtcttttaacttttctgccagcaattcaataattcctatacttgcaagcataccggttttgacagcatccggttttatatcatccatgacacagtctatttgctgagatatattctgaagagagatctcctcaaaacttttcacaccaagtgtgttttgtgcaacaactgatgtaataactgccattccatataccttttgttcctgaaatgtttttaaatccgcgtgaattcccgcccctccggaaggatcagtcccagcaatcgaaagcgctttataagtatccgtcaatttacactcctccttcaggcaggtttcactgctttaaaaatgacaaaaggcggatattccttttcacatttccaattattaaattgaaactctttctctatggcttttacatgctcttggtcaatatcgtttaacgttggttctgataaagttacattttcaaaacctgcaagagttaatagtttataatacattgacttcggccaatgaaaatcatttaaaattaaatctgcttgtccgggaacatggagccattcatttctttcttctccgtaagaatattctttccccggtattccattacggaaggttgaaaattcaattccggttgaatcaggattcgtatcgagtatgacaaatgaagctcctggttttaacacacgaaaaatttcatctatgatacctttgatacgctggtcactatccgtattaataaaaacataacaggccattgcagcatcaactgagtgatctggtaagaaggaaagattatcgtgttcaattaaatgatagtccacatgaggatgttgtctttttgcctttgctatatctaacatcttccttgattcatcgactgcgatcacattgcagcctattctgtcagccagcctataagctacctttcctggaccgcatccgaaatcgagcacctttttaatctccgctttatcaaaagtacgaaaaacaaactcaaaacctaacgtttgttctaaaacgtcgttataagcatcgaatttaccagcaacactgtcttctttccatgaagttttcattgaatttcctccttttgctcagttgagaaataatgaagccacttattcctgacgaaaaattgatatacaggaagtaaactttgaaatagagaatgatccatatcacgtttatatgcaatatgctggtatatactgaaaaggaaaagaatctgtttccagtaatcaggtaaatcaagcatttcaatatcgtttttagtcatagaaatttgatctttcctaagtaattcttcgtactttaagactgtttcaatggacggccagttatttccctcaggcattttcgggaattcaaattccggaatatcatggtgattttcagcttcttcaagcaccgttttcgcccattcatgatctgaatcataaatatggattgatcccgcattatgaaaatattctccgacttctacacgcagttctctggccattaattcctgcatgaaggtaaatgagaaaagatcactgatcatcccgcgaaaagcatcatttgcacgcatgacagaagacatgtataattcgccttccctcacaaaaaactgcaaaccgattgtgcaggaaacatctatattttctaaaacgaagagttccgaagcatcgaatatttgaataaatgccctttttgaatcaatatcttcttgtgtcaaaagattttttattctattccattgatttagttttgcatttccgaattcaaatattttaggcccgtacgcagtgcctgttaatgtttttttattcattgaatatgaaggcatttttttattgtaataactgataaaatctaagtcgttactccccgataaataccatagcacttcagcaaaattaaacacgatattggtttttcttgaggataaataagtaacacgttctattggattttccaaagtcagatggtagttcaattgttctctgcttttttgtccgcgcggtgaattgaaaaattcagggttgtgatagatgtcatacagcgtttccgtatatgcttcatgaaaagttctctttctcattgagattccgccttatatgctgcaaaggtatttttaatgttctctattaaatcatctgtatctttatagctgatgtactcaacatccgccactgcatgtaacccttgaattaagaaagcataatccttgtccttttctagaaatagcacgatcttttttttcaaggcggaagcccatccaatttctatatgtgttccaggagaagcgggtgatccgggaaatgctgcaaaaaggtcgcaagtacttatttcatcaaaatcaattttagtgcattgaaggggtgtcatgaaatctttcccccacccttcccgcttgtgagcattatgaaccagccatccttcattctcaaaaaaggaaattaatgattccagctttcccctctcatacgtactcatcaatccagttttctcatctactaaacttttaaaaggccctgccagaaaaacttttttagtcgccacttcatatcaccctttcaaaataaataaagccactttcctctatggaaagtggcttaaatatagataagataaagaatctctctaatttttcacttccctacgctggtattaaccaaatcaggttcaaagggtcaggacgtattgtctcttctcagctattaaagctcccctagtgactttttataaatatttactttaattctatgctattccatataaatagtcaaacaatgactttcccttcaaatattgcagcttacccactagttttaaaaccttccggcctcttttttcctgccaacgaataaggtcacggcaacactcgctgaactgaccaaagtccccagtacggcagcaagaattgtcaaaaagccattgggaatcagaaatccaatcggaatgaggcccgcaaacgtgaggacgataaaacattgatagactccggatatgattctcacaaccaaactgccaaaaaaggacatgacgaatggcggaatgaacaaacataagatgattccgagtgagatcaataaaatcataggctcgtcaaaagaaatgacacgatcgccgggagactcttcagcagccgcgaatacagcaaatatagacatcatcagcgtaagaaaaacaagaaaaaacctttttagcaacgttatgactcctttttttataaaaacgggtatctttttttcaatcacaataaccattttatgttatcaaatgaaataatatgaagtcaaaccgagttctgcacctgatttattggttcttatttttttgataatttccatataattgtccgcaagcagcatctatatcaatgccaaattgacttctgacggtcacgttaattcctgctgactttaattttttatagaaatttacaacttgtttctcatttacttcttcaaatctcataggtgaactaacagtcgggttatatctaatgatgtttacatggaacaagttccctctcttatatctgcttcttaaaagatttactacttcattcgcatgatcaatagaatcattaactcccggcagcataatataagcaatataaacttttcttgaggtcacacgtatatgctcatctaatgtgtccattacctccaataacgggtagcgttcattaatcggcattaacttgcttcgctgttcattaaaaggagaatgtaatgaaaacgtcaggttgacctgcggataatcctgagtgatttttttaatgcccggaataatacctatggtcgaaatagataacctgcgagggcttaaagcaaacaactccggatttgtaagcacatgtaaagcatcaaaaacttgtacattcgctaatgcttctcccattcccataaaagaaatactgtcaattgaatgtccttttaagtgaaagtacaaaatttggtcagtcatttcatctgacgttaaattgcgttttaaaccaatatctcctgttgcacaaaatgtacagccaaaatgacagccgcactgcgaggatatacaaaatgactcccaaccggctttatatttcatattaaccgtttctattttttcgtctcctgaaatttcaaataagacttttgtaacttgctcagaatgctgcacttttaaaggagcaatatttataattgactctccgaactcctctattaacaattttctcaaggatttaggaagaaccgttatttcattgaaatgatttattctcccttggaatacagcatttttgatttgattcattctaaaatcaggaaatttattttgcttcaggaactcttggattcttatatacttgtttttttgttgcatgttttctcatccttccataatactcttgtttgtttgagtaaatagaagggagttatcaatctaacctttttttaaaatcaggcacaaaaaaacaccgacacaattatcggtgttacgcttaaataacatcatgcacaaataaacaaggacattatgtcattggattatcgtttatttgacatagagaaaaagcaccgataactgtttttgtatggtgatttggcttaaaaaaggacagactgctccctttgtccgccaagatgtttccaatttttgcatttttaccatacaaaattccataaatcgttatcatcgctttcacctctttcttgtcaatattagcaataatcaccatatcataaggtttcccttatgtaaagctaaacaaatgcttacgcccccgctaatgacagtattatacaacttgcttattaagcctaatccaagtacagaaagcgcgctgatcacatttttcacttatccgcgacggaacatttcttatataatgggtgaccggcagctgcctgctggaatcccaatcttcttatagtgattttttatattcatgacagtatgatgatttgtcacttcatcaatcagatcgtttattcgatccagattgatcggtttattttctgataagctgctgaagctttctctgatttcttcaggatagacatttccggccatgcttgacaggccgttacacccgttactcagcatcttcggaaattcaacgtctcctgccgcaaacaaaataaagtgatcagggaactctgtttgtttatgacgcagaacgtctcctccttctttcagcccccttatcccgggatgccggcttattaagtctttaagcgctttctcactcagattaaaaccggtccggccggggttattataaagcacagcctctttagaggtatgactgagaagttcgtcaacgtaataaacggcttgctgctgtgtcggtcttatataaggaggaaaaccaatcaatacagaatcaatattggttttctcgatgtgtttcatcagtttgacggcatcactggttcttacggctgaaacaccgaacatcagttcaacatcttcaaattttcgctgattaacatactcaatgatctgaagacgctcatctatgctgagtgaatgctgttcaccagtcgtgccgcatatgagtaacgaatggataccgctgtttttcaaatgttcgacaatagcatcaaatccttctaaatataaacgttcatcttcatgaaaaggcgtagggatagcaacattaaaattttgcatgagaatgtcctccaagtacatattcttgaatatctgcagagtatcatataacactgtctgacatttaaaaaggtacagtttcagataactcaacatgtcagatgtaaaggccgacacacaaaaaaaagcaggcaaagagagcctgcttcatagcttcgtcttacagcggcccattccctggatggcttgacaaatatgagtaataaggcaaactgaatataaaaattatgctgaggtggggttaatgattttagatttaaaaggtgaaccgcacatggatcatcttgtgggaatgctgtattctgccgttaatgaaaattacagccgcttaatatccattgtgtcagacatgtcacagcaggagattgattataaaggaccaaatcaaacatacaatagtacagctcagctaataagacacttagcatatgttgatctcaactggatattcagaataaagggtgaaccaataccaaagcagcttgaagagaagtatggaccaatgttagatcagaacaataagatccctttcatttccggtgtttcattaaaacaaattctcactgattatgaagaagtattcagcatgtttaagtctgtttgttatcagttaactgacgagcagctgaatcatacagtagattatgaatcagaaaaacaagcaaccattcaatggggaatatggcatatggcagaccataatagatatcatcaagctcatattcatcagcttcgcaaatggtatgaagagaaacagaaacttggcagttaaagccgcttattaggatgagcaaggataaattcattacaaatgtctattttcactgactgccaatcaattaaaatggtcagacaaaaaaccacatctgctgttgaaaagttgtggaataaagcatcgcatcaactgcactatgacaagctgaaacgttaatattttgtgtttcagccattcaatcgctttatttcatcatgctgtccaaatacgattttttcctatagtctttgcagcagtaaagtcctctggaatcctatactaatcttccgcagccgctgcatcggcctttgtcacatgaaccgtaccaaacggatggttaggaggagcataaattgaatacagttttaacggcgtattacccgtattcacaacattgtgccaagtgccggcagggacaacaatggcaaagtcatcatagacatttctttggaaagttaaatgttccttgctcttacccattttaacgatcccccggccttgctcaatccgtaagaattgatctacgtgaggatggatctccaaaccgatatcttctccaataccaagactcatcaaagtaatttgaaaatgctttcctgtccataaggccgtacggaacgtattgttttgttttgcggctttattgatattcacgacaaatggttttggtccataatctttcaagagaaggtttctatcttcgtatgaaggatcatagttatttggaaaagtccaataaacagatcttccatcactatacatcggtacattcacacaataataacattgatgcgaaaaaggtatataatacatttgtcatccccgcaattttaaatttttgtgatattaccctatgctttttgtaatgagagtgtgccgtactaagaaattcccttgttcagcctaaaagacttaagttagcggaaacgttttggccacaaaatccgtttgcataaaaaataccaactgaatatgcgcggactaaaatcgttgcactgatggataatttaggcacatgcccttatcaaaaacaatctgggtgcatatcctgctcctaaaagtcattcataaagggagtttagatatgtattattattatccgtattatgtatatgattacagacagcagcctgatttaagtcaggtaaatcataaaatgcgaagccatttatctgcgattcaacaaattccaatacactcatcctcctttcaacaatcaatggctgcggtagtgaaacacttgcaggctgtcagcagagcactcgctctgggatgcggtatgagttcagaattcagatttcttccagacacttggggattacgagaacttcatattgtacacgcgaaatatcttactccgttgagctatcacgtttattccgctttaggcgcagcagagcttctcgcctccggacaaggccgggctcctcattttcctcttatggtaggctgcatgaattcaatacttcgtctatggtcaaacttccccgcagcgatagcagacctgcgaagagcagccggtcaccaatacgcgtcatctgtagacgaggcggaaaatctcctaagaccaatggttccagccacacaacaggcattatccatcagtcaatctgcagtgagtccggctatttggcaggcttccttacgtgccgcgcagttagctagggaggtacgtcagaatgttgcacaatcaatgagtcagggatcttcttattaattaagccaaaagattttttcggctttacacagtcacataaccggacttattcaacacaaaaaagagcagtaaacacgtaagttactgctctcctctgtctatccgccgttcatttgttttacaatgtattcagcatcatttcctacaccttgaagcagcgctgaacctcgcctatgctgccaaggcaaaccaataaagtacaatccttccgcagctgaaacaccccggtgatgtataattcggccttccttatccaaaacaccttctattttcatccaacaaagcggattcttaaaaccagttgcccaaatgatattgtttacttctaatgaagatgaatctttaaaaatgatttcattttgctttccggctatgactctttcttttaagatgatcttcttctgtcttattgcatgttttaattcatacccaaatatggggtcgcctttcttctgaatgaacttgcctactattgatgtatgacttgcatgtaaaactcctaatttatcaaaccaccaaaagatgcttctttttccaatccataaagggaaataaaccggtttattactgcaagccaaatatgtaactctttctttggataattcaacagctatctgagccccgctattcccgccgccgactaccagtacattcccaggcgccagttgttttgaatgtttatattgtgaagaatgtaattgatgaatatgatcggctacatcccttgatattgatggaatgttaggggtatgaaaaggacctgcggccatcacaagattcttcgtttgatattcttcccgatttgtttttattaagaaatagttctttaatttttggacacttattacttctgtccgtaactggatcgggatttcaaatctttcaacatattttttcagataagcagcaatttcattttttgaagggagtccatgcttgtctccttcaagctgcattccaggcaaagagctgtacattcgagaagtaaataaaaccaatgagtcataccggttgttccagctttctcccacttcatgacttttatccaaaatgataaatttttgtttcgacttctttagataatatcctactgagattcctgcctgaccggctccgattactatcgtgtcgtacatatgaatccccctccggttttatcttaattgtcagcagacaaagtgagtccctatttcctcctttaatgatgatgatggtcacgcggattctcagtttgggcctgacaaagaatcgtattgtcgtgattatgcgctgctgtttccatttgaatggttacatgtgtaatgcctttatctccaagttcatgttcaattttgcgtaaaatactttcactttcagaaatggtcagttcatcgttaacaacagcgtggcaggaaagagcattcaatccgcttgtgatagaccatatgtgcaaatcatgaatgctttgaattccttctgtctcttcaattgtatgaatgatgtcagtgacatcgatattttccggagttccttccattaatacgtgaatggagtctttcgtcacatggtaaccgcttctcagaacaagaatagccacaatgacactggccactggatctgcccagctccacccgaagaagatgataaggatcgcagccagtatggcacctacagatccgagcatgtcacttatcacatgtaagtaagcccctcttatgttcaggttattctttgtatctccgccgttcagcataatccaagcgaccaatatatttacagctaacccgatgatactaatcgtcagcatgccggttgttgctacctccggcggatgagagaaacgtttaattgcttcataaatgatataaagggaaatcaatattaatgcaacaccgtttatcacagctgcgagaatctcaaatcgtttgtagccgaatgtcttatgatgacttgcctttttttcggccaatttaaaagcaatcagagcaaccattaatgagatcgagtcactcagcatatgacctgcatctgacaaaagcgctaaactattggttaaaaatccgcctatcgcttctattatcatataacctgtaatcatgataaaagagatcaataaaaccttcttattggatccaccagcgtgattgtgacccataaaaatctcctccttatctcatacactgcatttattatttcttttctgttatgaagcattctaacatggacaaaaaaataaccttatatgattatgtgctcatatatgaatatataggttctttactgaaatgtcaaaatcttttcaatgaaaatgtccaatactttatattgctcttgatcaatgattgctatgaagccgcggattacagtaattactttaggcgcagacaatttagaaaaatcgcttcacttctatcgggatggcttgggtctgcctacagagggaatagccggtacagaatttgaacatggcgcagctgccttttttgacttacaaacaggactgaaacttgccatttggaaccgcaaagacatcgcacatgaaacaaacgttacgttaactgcgccaagccctgcagaatttacatgaggacataatgttggcagtaaagctgaagccgataaagtcatggaacaggcaaaacaggcaggagcaacgataactgatcccgctcatgatactttttggggcggatactccggtcacttccaagacccgacgggcacctatgggaaatcgtttggaatccgcactgggatgcaattgaataaccaaatttagcaacgataaaaacacacctgaatgttctggtgtgtttgagataatgtttagaatgcagatcaaaacgcagcgtttttattttgtttaccaaaacgatcaaactatttatacgatggcgggatgctttgcggaaaacggaatacattttcgggatcgtatttcgcctttattctttgaagccttgcaaagtttgagccataatatgcttttccgaagttctcgatattttgatccggaacattcacatatgaacctgttacatatggtttcatcagctgacgcactctttcaactgatgcaagattcgaagcttcttgtgatttatttttccaactggccgtccattccgtataaaacaacggacggcgccaatagaaggctgtttcactgcttggtactctgcttatcgcgccgccccaattgataaaaaagaaattggtttctgtcccagtcgctttttctaaaaattgtctcattactgcaataggttcttccggccaaagattgagcgcccacgccgaggagaatttaacactctgatcagatctgccgggaatcggttcgtcaggatctaagaaatctatacaatccggatagtatagtgttttgattactgtttgtgccggcgttccggcatttaataaaggttttaataattgaaccagctctggttttgaaccgaggaacaatccttccgcatggcacaagccatttactttgctgtaaatctcaaggtagcatcctaatcgttcgtctgtaaatggcgcccatttttgccacgctttaaataccgtttctaactgttcccacggccaaataatattaaagacggttgcggttttaggggcacggtgaactttgaatgtatattgggtgttatatccgaaattgcctcccccgccgcctctggaagcccacagtaaatcttcattgcgggaatgatttgcttgtatgatcctgcctttggcatctaccattttcagtgcgagaaggttatcgcttatcaggccgatcgatcgtgaaagcactccaaatccgcctcccatcgtgattcctccgattccgacggttggactgtctccgaacggggccataaaaccttcccgagctaaaccttttacaagcgggccgacgtgaatgccggtttgaacggttgctaccgcgtttttttcatctaagaaaactttattcatgtcactcacatcaataacaattccatcacttaccgtggaaagatttttatccagagcatggcggccgcttctgacacgcataggtacattcttctcacgagcccatttaatagcattacttacatcgtatgaattttgtgcaaaaacaaagacaagcggacagacatcaacataagggttccaattcttaaccgcctgtgtatagccggggtcccctttgaagatgacgcgtcctgttaactgtgctgatcccatctatttcactcccaataagcatttgattccgataccagtatatgtaggaatgggacaaattcttagacagatgttctgcaaacttaaaaatagatacatatacgcgaagatgatataaaaacaaaaaaaagacaagagcggcaagctgccgaaactcttgtctctcctgccttttttatcatgataggcacttacatttattggcgtgatatcccgaccaaactatggaagtccatagaaaattatgtttgccctgccatgcatggttctgctgagacaccggctgagcaatctttctgcttgatcccccgacaagaatcttattctttatcgtttttgcacccctgtattgattttctcagtcaaaaatcttatcttttacgttatgaaaagctcttattttttcttcttgtgcttacgtttgcaatcctgttttttctctttcttatgacgttttttacatttcgcttttgctgctaattttgccgcttttacctttgcttctgccgttgctcttgctgcttctgctgctctggctcttgcttcttccgctctggctatcgcctcttccgctctggctctcgcttctgcttctcttgctgcttctgctcttgcttcgtcttccgccatatcaaaatcatggccaaggtcacaggcttcgttgtatggctttttcttctgaacgtactgttgatcttcaccttcgttataatacattacgccactccttctctcatcttttaatctttacatactatgtaaagaaataactgcagcttggactggtattttgatgaaccggcacattttaggataattttcatttatcgatacaacagattctggatgcttgatgaaacttgaatgatttttgacgattataataagcagcgtaaaaaggatgctgcgcgctgcagcatccttctgtaccaactttttgtgtttttgacttttagtttgcttgctgtgtttgttttactggttctttgctaaaaagtccgacaatgttccacaagataattgcagcagctatgatcaaacgagccgtactgacttcttggttagtaaacaatttatagccatatactgatcccaatgctgctatgcaaaaaatattgaaccatttactccaacgcaattagaaaactccttataaaacgattacatttccaaacaatgtattataatattaacacaatttttcaatatttaaccttaaatcattcttaattggttttcctgatcattttctctaatcgtcattcgatctttcggatttttgatcgttttttgttacaggctagacccagacatcattttcagctgtttgatcagttatttcctgccccgtattcacaacacctttaggctctacaagcaaaatgttacactctgattctgcataaggtttatgttcaacatttttcggaatgacaaacatttcaccttcatttaatgttacttctccatcacgaaattcaatgatcaaattacccttaatgacaatgaagacttcatctgtttcgtcatgcttatgccaaacaaaatccccttgtactttaacaagtttaaattgataatcattcatttcagcgattacttttggagaccattgatcttggaacgcagctaatttctcttgaaaattaatcggtttatattccattctttccgctttccttgtaaaactctatcatttaactagtcccaaattaaaggcctgtccacttcagcagttctgagatagtctaaaagctgaccggtatgtacggactcatggtaagcgattcttaataacatgtctcctagttcgcgaatatatccaacatcagacctgtcaatctttatatttgttaaatctgcttcgtttaacgatttgatgaatgtcaaaaactcggcccgatacggttttgcaaattctaattcttcggttactgtggtaaacgtttttgactcatacgggtttttagattcctctgaagactcattcatttgttttagtaaaatgtgatgataaagaaattctgcttctaatacatgtcttatcatttccttacacgacatggcttcggaatccgggcgccagtccattttttcctcaggtatagctgtccataacttgatgcttcgccgtcttacttcttcaaaatttaaaataataaggtcaatcgtattcaagtgttttcccccttttatttttaaataattctccttcttcccggaaaaaacctctttaaataaaaaacgtattctttcccaactcgctggattggtaatttaagataagaagatattcattcatccatacaatagactctggttgaacatatactgaatgatagttttcatcagaaaggagaaatcagctttggcaaagtatcggatcatgacctttgacgggggcggtaccttaggtgctttaagtttacagctattgaacagactggctgaagaaaatccagcattaataagccgaacccatgtatttgcgggaaattcaatcggttcatttactgcccttgcattagcaagcggaagatctccggaggaaacacttcagtattttgaggatgagatcctgcccgcattcagcgtttcccggccggggggacctgttttcaatcaacaattgccctattccggttttattaaagcggtgcgaaactttttcccgccaggccttcgtcttaaagatcttagaaaacgaattgttgtcccttcattcaaattatactccccagcactggatcgttggacgcccgtattatttcacaactttcccggctctccctatttaaatgagaaagtgagcgatgtcatactgcggagcagcggtgctcccgcgacgcagcgagcctatcaaaactacgtggacggatatgtagtggcaacgaaccccagtacggccagtatcgcgtttgcggttggtaaagccaacgtgccactggatcaaattgcggcgctatccatcggtacaggtgaagccccgactcggttaagaagagatacgaggggatggggaatggtgagtgcggataacatacgtcccgaaaatctgaagaaccttcctccaaattggggagtccttttggacaggtcgcctaatgaacctttactgccatttcttcagatgatctccggcggaaatggctactatgaatccatggtcagcgcgaatctgctgggagatcgctttttccggttagatccgcggattcctaacttctccaaaacagacccttccgtggttcccgctgtcattgaaattgcgaacaaaaccaacttacagcctgctaatacttttatagagaaaaactggaacgacagccactaagtaagtcagaagtttacgtcatcatacaatgaacaaaaaataccaagggactcaaaacccttggtattattaatgcggccgagagggtttggaccttcctggggtatttatacgctgggcattcgataaagtgaaatcttattaccgcccggcatttcaaacactgaagttaagcattacatccaacaatcgggccatttaattgaataggactactcagaagtcgcttcccattacgtaagaaaagcgactttttagatttgattttcaagttcctttgacaaattttgaaaagaccattgactattcagtcgaactgtattaagtttaactatatagtcagactgaatagaggatgaggatatgaaacataaattattaccgctgtctgaaaccatgcattatattttattagctttgcgggagccgcttcatggctatgccgccatgcagaagatcgaaaagatgagtaacggaactgttattttagcagccggcacattatacggcgcgattgaaaacttgaataagcatggctggattgaacctgttggagagtcgggccggagaaaagtttatatgataactgcggaaggaagcgccattttgaaaatggaacaaaacaggttactgcatattttatccctgcacgaaggaagtgaatcgaatgaagaaatttaagatgttttttgatattgaaaaagaggagcaatggctgaacgagcaattacaaaaaggctatcgctgtacaaatatcagcggattaggaatatacactttcgaaaaaaccgacaaaaaatatgtgatgagactggattatcaagattatttatcaaagaaaaaattcgaagattacagagagatatatgaagacttcggctggagttatataaatggcccttgggggcttggaactcgatattggcaaaaagaagatgatgatcaaaatgaaatcttctcggatcgccaatcaaagagtaattattataaaagactaatgagtttttcatcttgttttgggttactgtgcttgttttattgtaatatgatttacacgaattcaggtttgtatttagctgaaggtctgtggagtatggaaggcgcaatgttttggaaagcatttttatttgaaactccatttgcccttttaaggtcgcttcccgctcttatggccgttctctttggctgcagtttctataaagcgtatcgaaaatattcaatgttaaaagaacaataacgcggggaagttacatttaaagaagtaatcgaggatcatgtatctgccgaagccgggcgctttaacggaaaaaagcgccctgaatttgctgattaatcagacggcttattttgttaatgatacatacttatttacaatggcttgagcgagacaagctgatgaatcaacaaaggtaagttcgctgcttttttgatccgtgaccatatttaaatccgtacatgcaatgataaccgtatcaaccttttctgctaattcacggtgtaattcatcatataatgtaccagcctcatcggtttgaccttgtttaatcttttctattatgtgatcgacatagatttgccaactatcttgatgtaaaaaatcataaccttctctgtttaacgcttcttgaaatattccagattgaaccgtaggaacggtggctaaaagagctgctttttttgagcctttaggtattttttttatggtttcatcaaccatgtttagtaaagggactgaaagcgatttttttatttgattaaaataaatatgtgcggtattacatgggattgcaataaaattaacacccgttttttcaagctttacagccccctcaataattgcattttccatgtccgtatgattgagaggtttattcatgtagaaaggagtcggacaagaataaatcatcatatgaggaaaatccatgtcgtgtattgctccatatattttttggcactcgtctactactttatctacaaatggcccagtagattttggccccattcctgccagtattccaatcataattgtcctcctctgtaaaaatgtgtacgaatacgatcacgatgagttattcttgtgtttctcatctgaatctgctctcatttctttttggctgtcttctcctattttatcatttcattaatcgaaaaagggactttaaaaaagatagctggcaaaccagacgacttgctcttgggcgccatgtttgttaaaatcaccatcttcgttttaaaacgtacaggtttatagtgtcccataacgctgtcctaaataaaacactggtcgcaactaagtcaaatgtttttcacggtactatagtcaagacttgcccaagtcaccattatcaaaaagaatttcatcaagcacttgaaacatttattgaacgtgagcaagtgttataacatgaataagaaaccaaggagtgatgaatcttttaatctttcattttacccgctgactcatatcaaaggagctctaaccaaattttaatagctgtcgcacttattaataacgctaaaatccattgcaggaattttgtatttactttttgcccaacagatgcgccaataggagaagcaattaaactgacaatcataagaaccagagccggtgcaaaaagaacctggcccgtgattacttttccaactgttgcgccaatagatgaaagaaatgtaatcgcaagagatgaagcgactgtgattctaacagggatatttaaaatcgataacataatggggaccaggataaaagcgccgccagctcctaaaatacctgatacgccgccaatgataaacgctagggacgaagccaaccatttattaaatatcacttcttcgtcttcgctatgttcttgtccttttttaggtataaacattaaaacaactgctagtatagccagaattccgtatataaagttaattcctttttcagatatataatgagaaaagtaactccccaatacactccctaaaaggatgctgcttcccatgtacataattaatgctttatttaaaaaaccacttttacgataagcccaaacaccgccaagtgtcgcaaagaaaacttgaatagcccctatccctgaaacttcatgggcagttaatgacatcactcccactaaagaaggaatgtataatagcattggataattaataactgatccgccaatacccatcattccggaaataaaggcaccaataaaccctataatgaaaagagttgtgataaaggcaatatccattttggttcctcctttcaaagaaaaagggcatctttgtattcgataccctttcacatttattagccttttttaatccagaatttcaatacatcgccttcatcagtttgctctaaaaggtcatgcccgcctgatttagaccaagctgcaagatcatttttagctcccttatctgttgcatgcacttctaatatttgacctgattccagttcattcatcgctttctttgttctgacgattggcattgggcatgccaggccttttgcgtctaatactttatctgatttcatgttcatctctcctctttttaatagaaacttgtgttaccgtattgcacagcggtttggaccaatctccatttcacgctgtttttcttcatccgggctgattttccccatgtttgtttctcgaatctcttggtatgcatttggctgcggaggcaaatgatctgttactaggtgtctaaattctgtttcatccgcaatgttcaaaccatggttctcgctaaataatgtacgtagttttttaccaacacttccatcctcatttagctcgtcaatgatcataaagtgtgccggtaatacaattaaatcctttgataacgcgttgtaacggctataaagcgttgttcttaaatctcccgcccaatcttctgccatatcggctaagtctggtcttccgattgaatcaataaacaagatatcacctgaaagaagatactgatcatcgacaatgaaagaagtggagccaatcgtgtgccccggtgaataaatcggttgaatgccaatctttgtgtttccaatgacaatatcgttgccttcttccagcggctgataatcaaataccgcttcttctgcatccttcggtggtaaccagtaggttgcttttgttttttcagctatgactctgccgcctgaaatatggtctgcgtgaagatgtgtatcaaatacgtgagtaatctccgcgcccttctctttcgcaaagtctataaaaatatccgccatacgtgtcgcatcaataatcgctgcttcaccattggaaatgaccatgtatgacaggcagcctttaccgattcgaacaaactgatacatctcaccgccaccttttaaatccccgacttttaccggctctaaatgttcgctccatgctttcattccgcccttaagataggatacagaatgacctgcttcagaaagcatttcggataccatgacagatgaaccttcttttgcacaaacgaccagcacttctttatcagaaggaattttctccaagatatcttctacgccatctaaaagatcgaaatacggtacatttaaatggtcaaaataatgtccttcaatcttccaatcgctaaaatcattttcattacgtacatccagaataaataaagattctttgtgaaagattttttgtgtgacttcttttgcggtaagtgcttgaacggtcatgtttacatacctcctttttctgttttaccagtccaatcccgcataccggggacaacattaataacctttttaaaaccttgttttttcatggtgtgggccgccatttcacttcttcttcccgaatggcagataatataaatttcatcatttttgtttaattcgttagagcgcttttccacttcgccaagagggatatgcaccactccggggatatgggcttcttcatactcctctatctctcgtacatctaaaatgtgaagagactcgtcactatccactttctgtttgaaagcttctaatgaaatctcaggaattgaagctgcattttctgctgaaagctctcctccttttcgaagaaaatgacgaagtatttccccctctgcttcagtacctagatattcatggcctgtactatttgcccatgcttccagatctgctgtagaacctttatctgtcgcttgaatttctaatatgtcaccagcttttaaatccttcatactcttcttcgtttttacgataggcattggacacgccaaacctttagcgtctagtacaatatttgctttcatcattttttcctccttttctcatataggggcgggggtatataaatatgcaaaaagttactctctggatgttaataccatgtattcataccaccttttatatttgtgatatttttaaatccttgtttcttcaatactttacttgcctttatacttctcattccgctttggcagatcacaaagacgtctttgtctttcgaaagctgatgagtttgacgaggcaagatagacaaaggaatattttcgaaccctttaatatgccttgtgcggaactcataaggtgttcgtacatctataaactgtttgtctttatttttcagctctgactttaaatcagcagttgttatttgtttaacaccatgcaatgggaaaaaacgtcgaaatacgatccaaagtaaaaataaaatgagtaaagtattgaacattactccgctattcatagtgttataacccccttcacttattcaatttgcaatggataacattagataaataagttgacattgccttcttcagcatctgccaaataagcagctacaccagcatagtcgatatcatctaatagttctttttcctgtaaaccaagaagatccattgtcatcgtacaagctacgagctttacaccttgttcttgagccatctcaatcaactgaggcaacgtaagtgcattatgctttttcatcacatttttaatcattttagggcccatacctgcaaagttcattttagataaacccatcttatcagcaccgcgaggcatcatctttccaaacattgtttcaagaaatccttttttcactggaatcagctcttctttacgtaaagcgtttaatccccaaaacgtatggaagatcgtcacttcatgatcgtaggcagctgcaccatttgcaataatataggctgccattgctttgtcatattcgccgctaaataaaacaattgttgtgcgttttgtttgttttgtcatgtttattctcctgactaaccaccattacccctaggggtatattagaattaaaaattttttcggaagatctcctattattcaacccaaaatactggcaggggtatattataataaatataaaaattcgtcaaccttaaagatgataggttgatgaatttttttatcggctctttaccaataattcgaccgcttcttttactaagtgttgtgtgtcttctcccttttctaaactttcacgaacacaatgttcaaggtttgtgctcacaatcaaacccattgctcgatcgatcgcattacgtgaagcagctaattgggtcacaacctctctgcaatcttttccttgttccatcatggtcaatacaccttttatctgtccttctatccggcgtaagcgatttttaatcttttgatcatattccatgcgttgaactccttctttgaaatttatatatttgcatgttatcaactatcacttcatactatgctttatcacactacattattaactagataatgtttgtgaatcaatattatacccttacaggtatactgtcaattttcaagacggcatgagaatgattataaagagttaatattagtaccccctgttttacgttaaacccaaaagattaatcacaagaagtctccatatttacttaacatgctcttaattgcataattggtatccttgaggagaagaagacatcgaaaaagtaaaaaagtaaacaaacctaggattcaattgctgtcattgatgtcaagtcatgaactcctaaaggagatttaataactcattttcaacgaaaaactgctctctgttaattagtcgagattccaagatatacacggaccaattgacctttccttttttaggaatcccacaggctccctcttgttttgatgctgtttttccaaaaagttattgacaccaataaacgaccatgttatcattaaaaatttgatatctcactccatatatgataaccttaagttaagttcctatatatggaggtggatgatatgtttcaaattggcgataacattgtttatccaatgcacggagcaggtacaattgaagccatagaagaaaaacaattcttagaggaaaaacaacagtattatgtcataagaatgtcaatcagtaatatgacagttatgattccaacgcgtaaaatattgagttcaaatatacggccggttactgatatacgtgcattaaaacacattatacacatttttcagcatggagaatcagataggctactgccgtggaagcaaaggtatatagtaaacacgaacaaaataaaaacgggtgaaatacaagaaggcgctgaagttgtacgtgatttaagacggatgaagaaagaaaaagcacttaattcaagcgaaaaaaaaatgttggataatgcatatgaatttttgattagtgaactggaattcattaaaggaatcactgaaaaacaaataaaaagtttttgctaaggttaattttaaataatgttttgcattccaaaaagcacccgaaagttttcggaatattacgattagatgtttaacttcttcaacttacttttaaaacattaaccccttttattaccccaacaatctaatctgttttatttttttcttcaacgaacatttgaatttttatcaaaaaactcgatgaaatagtcacttaatttttgtaatcctgattcacactggcacggacaaggagccgtaaggatggaagagaggcagggctttcattgttttaggtctaagtgattatttccagaagaaaaaacaaccactctcctctttatctttaagaatttcttacatctgcttccacagtgaatagcagttgtttatcttctttttatattagagatatgcgaaatgtaacaaagaataacatacagatatattgagaacataaaaacaaatcatttatatatattccacatatcgtcaatccggtatgttatactgtaaacaatcctttgaggttttaaacctttttcttaccttgtagcaactgtccctactcgaacgttgagtagggtttttttattcagtatgatacagagaacataaaaaaacaggctctatataaagagcctgtttgtataaacgattgaagattaagcagttttttgaacgttagcagcttgagctccacgagcaccttgctcaacgtcaaacgttactttttgaccttcgtctaaagatttgaatccgtcactttggattgcagaaaagtgtacgaatacatcgtctccattttcacgttcgataaatccaaaacctttttctgcattaaaccatttaactgtaccttgttccatttttgttgcctcctagtgtgttacacattgtattactatccttgcccaaagtatcatcaagacgaaaagtcgatattcatactatcctttacacgaacaaaaataattcccctttatcatagcacgaaacggaaataactgcaaattaataatgtgttcattcatgttttatttgttaaacctgtcgatacgagtgcaaaataagatgcctattaataactatggtttgaaaacaccgtgaaaatgaatcacgagtgtcttcaaacccagtacttcatattgattgttaaagatttctttaaaaagctcagctgtttcttgttcaagtacaagatactcttggctgttcactggtatagctttgtttctgcagatgtttccaaacgatcattcaagtataccccctattttaacggtattaacttgtcatgtttgttcctcaaacaatcaatgtttacggtctaaataaaccgattcacataggggagcatggagagagtttggcccgataaagagccgggtataatcttcatacgctttttgtatcccggctggccattgctaataaagatttaatcgagatggagatcagtttctgaccttcaataattttacataggattaggaaagatacttattatacatggaacttattcagcttctccaacaactgtaaagcgttcatttatatgttttggattttcaatttcatccaatactgcaattgcatagtctgcatagctgatataactttcgcctttcgaattcacaagaagatgatcttttcctgactgataaaatccagttcttttcccgtctgggtcaaataccgctgaaggactgataaatgtccagttaatatcagaagtttcctttagttcttgcaagttacgaccttgccctttagctgttggaataaaaatctccgggaaatcaggtgtatccattacactgacagttttattttcgtctacataaagactccctgctccacctacaattacagctcttgtgcccgttccttttaatgccctaattaatgcccggccagcatctacatgtgcctgttcttctcctaatggagcaccgaaggcattaactgctacatctaacttttttagatcatccgatgtaagatcaattatatttttttcaatgattgaaatcttttcctctttaagttttgcagcatctcttacaattgcagttacttcatgtcccctgcttaccgcttctttcaagataagacttccagcttttccggttgcaccaatgattccaattttcaatttaaagtcctcctaatcattcaaaattttaaatgtaaccatattgattacatgtaataattttagttacaccttatttatttgtcaatacttttatcatcttgttaattgagcatattagagtaaaagaacttgtaatacattcagttacaagtgtactataaagagtgtaacgtaattaggatggtgaagaaatcatgtctattagcagccgttttgctgtaggaattcatatattggctcttattgaaataaatgaagacggaattagcacttctgaatttttagctggaagtgtaaatacaaatcccgccttcataagaaaaattatggggatgctgaaaaaagcaggtttagtaaaagttcggccaggtattgcaggagctgaattagcgagggatttaactgaaatcaccttacttgatgtttatagagcagttcatgttgttcaagataaagaattgtttagtatacatgaaaatcccaatcctcaatgtcctgtaggccggaacattcaaagtacaattggtccaatatttgaaatcgcccaatctgccttggaaaaagctcttgggcatatcacaattgatgatgtggtaaaggatattattgaaaaagaaaaattgaccaataattgttaaatgatttcacagaaaatcttttatcagattgaggataagaaaaatggctttttcatgaacaaaaaaagagcagacataaagtctgctccttttgatgaaagatttagattacggtaagggatataaatatgctcatgatacagaggaaaaattaacgacaatgcagacgatgccagattctttaataggggtgagtattactatccaacaactcaaggttcagaagctaagttcaaacaaagacttgaggaaatctcggattggtataaaagaaaccgcaaatcttagtttgaacaaatatgttctgtatataaaaataatgaggtatggagtgaattgataatgaattatgatgaaataaaagattactgcctaacctttccaaactcttatgaagaccatccttttggagatggttggactgcaattcggcacaaagggaataagaaaatatttgcacttatcttcacccgcgacgaacacttatgtgtcaaccttaaatgcgaacctgaaagggctgattttctacgtggtctttttgaagaaatcaagcccggataccatatgaacaaggagcattggaatactcttaccttagatgagggactcccagagcaccaaatccatgacatggtaaagtacagctttgaactgacaaaaccaaaaagtaaaaaggaaacataacatcgagggatagaacgctcattatagatattcatccggtgcaatgatacagagaaatatgcaaaaaacctcaaggcagcaatgtttaaattcgtatttacgagatgattttttcgttattgttagtcctttgtttcttgacataggttgaacaaataaaaaagagcagactcaaagtccactcaattcattaagatgattgcttatttcatccagacacctataaaaaatgaaaggtgacgatgatatgccacaaaagtcatttagcgtttaattaatactgataactcaccttcaaacactttttcttctttctgattataggtagataacaatacagtaagtatccccgtctggcttttatttggttttttatcaataaccttaacaatagtgtgcagtttatcattagggtaaacgggtgctaggaattttatattattcattcctgtcccagcaataatatcgtcttcatgacacccttcttcaatccaaagcttaaaagtaatagataacgtttgtattccagaagcaataattccattaaatctgcccatttttgctttttcttcatttaaatgcatgtattgtgggtcatacacttctgcaaaattcattatattctcttttgttaattcaaaagatttagtttgaaaaacctgcccgatggtaaattcatccaacttcataaataaatctccttgaatctaaactttattattaaatctacgtagcattttaacatactggctctcacacaacaacttaacggtgaaacaatcgttcccctatcaggaatgaacaagcacattgtttttgtttccttgcttttaacctctttataatcaggtgttttcttataaagaccaaggcggtcgccatcaccatcacccggcatatgtgtcatttcctcataagaatctccaagcttctcataataagaataagcagtaagcttgcgagaactttcttctggctgataaaacgcaagttgaataaacttcccgtcatcatatacacgaattatggcgttatctcttttgtactcatctgaatctgctcgcatttcttttctgactttcttctcctgcttcatcacttcattaattgcattatcatatttactaccgccgcacgcagtcaacagaaggatgaaggtgactgacaaatcatacggcctactatacagtaacagatgaattttccgcaaaaaaaataccaagggcgtctacaacccttggtatcattgatgcggccgagaggacttgaacctccaagggttattcacccgcagggccctccatctatattcataaaactattgctcagttgtcagcatgttaagtaaattacgaatttccttgttataacttttaatttcttcttcattacaaccggttttatcaaatactgcgttaggtatcattcacgatttcgtgatgctcaacgccttagctaaaactgaagctgcgcgcggagcaattgatcttgccgcaacatggctgcgtaaagggttttaattcatctattgtttcgtcacttagagactgctgcaaataaataaataaaaacaaacagatccactcaaataattgagtggatcgtatattgattcaataacttatcgcaaatatattaacgttggaataatggaacttttgatgagctttttaatcgggctggttattattttgttgttgagatgtccctaattgaaaagctaactccacaacaaactctattttttcaccagtccaccctcttcatatccaaaaaacctttgttgataaaaacaataggattattagttagcgtacaagttctcgttttctgctttggaccccatatagaaaataaaaagccagctctccttcgggagaagaactggcataacaaagcttcttgtttcttattttgctgtattgctcggaccttttaatttctcttcgttcttgcgtcaatgttttattattaggacacaaccaataaaataatgacgatcgagaatagcaacgctgcttttgcaaagcagtaagccctccagaatataaaagagctgcagtcattgctgctcggataatcccagcttattctgagtctgtatttcgagtagccggtcaattaaatggatgtttttttcattccttttctgtttgttccattttccaccatagtgaatcttttggattttcaacagcctcttgaaactcagctttagaagcaactgttgggtaagaaccttttaaagatttacctgaagtatctttaaataaggttaacacaactattaagccaattaaactaactgccaataaatagaaacccggcgccaaattgtttcttgtcacatgggttaaccaagaagcaactaaaggtgttgttccgccaaaaatagaaactgataagttgaatgtccaggataatgttcgatatctaatgtcagtatggaacaacgtaggtaaagatcctggcatagtaccttcgtatacagataatacaatacctaacattaaaagtcctataaataagaatattagactccccatattaagaaattgaaaagagataatcgaaaatacaattcctaatactaatccaattgttataacttttttatttcctaatttatctcccaatttaccaaaagttaaagcgaacggtaccataataatcaatacaattgctgtaaccggtgtacttatattatcacttataccaaggttctcatctaaataagaaggcatataacctaacaataggtaattggttatattgaaaaatgccacaaatacgatacataaaaagatatcttttttatatgttttaatgacttctaataaacctggttgttgttcttggttttcagagatgtcattttcaaagattggtgattcatctaaatgacttctcaaatataaaccaaataatcctattggaatactcaagaagaaaggaattctccatccccaactattcatttgaacatcagataaagtccagaaaagtactgtaactaaaacagacgctactatataaccagataatgtgccgatttctaaaccgctgcctaaccttatacgtttattatctggagaagattctgcgatatataccattgcaccagcgtactctccacccacagaaaaaccttgcagaatacgagctaagagtaataatataggggcccatacaccaatctggtcataggtaggaagcacaccaattattaaagtagataaagccatcattaaaatagtaattgttaatactattttccgaccaaatttatcacccactttaccaaaaataattccgcctaccggtctaagtaagaaggcaattgcaaatgtagcaaaagtaaatattaactttaattcatcgttttgaaccggactgaaaaagtttttactaataataactgccaaataagaatataaagcaaaatcaaaccattccatcgcgtttcctatccctgtagcaaacacgcttttcttcgctttttgaatgtctacaacgttaatttttttcttgttaaacttcatttaataatatcgactccttaattatcaaatccacattatacaagcgtataaacggtccaagcatgcagtcccagaatgtatagcgtaatgcttctctaaaagtctgggggtttctgtttcacctgatggagagctaacggcatagtggatgattggttcaactgtaccttaaaagactagacgaatatccatatcagcgccaaataacattgtaaaccaggaaagaaggatgaaattcagttttttcgctggtttccttaacttatttttgccgattggactaaaaataatacaaaaagcaacaaaaagagaaacatccaacagataataccagccaaagcggttagtgatatatccgtaggctgtggttggtattttctgcagactatttggagaaatgattccccttcatacagctctattgtgaatattatcacaatcgaaaaaaaacttttatttcttcaaaggatcctaaacctatattttagttcttccattacgtctttatttactgattctatctttattaccccgcaatcaggtgaaacaaaacactataaacgtagcatacctttttaaaatctgacaagcccaacagggtgatagaaacccggctaaagccaagctagtcaatggatagaagaaatttttttgtttttcccaaggaataaccgtctgcgtttaatctagcccaattagaaagaaaaagagcaggagtaatcctgctctttcattcaaaactttaatttgtatgaagaatttcgtataccttttcgactttctttacctattaatcagtatacagactacaacagaaataagtagcaccgggtatgaaataatggatgcatttaaacaagccaatcaccgacaattgaatttattgcatgacatctaacaaaattattttttaaatccagctgtaaataaagaaacatttcttaggtaatggttttatttttggtaaatcgacatgtatttgtttccccttccctgtaatccaaatgtttcgatatgaacatttaatcctttcatacatttatcacaattttaacaaacttttaactgaactgggtaagttgaacaaggattaaacattgaattttgacaatcacaaactgtcatatgtgtccgtcatatcaaaagaatctctttaaggtgttgtttagtgctttcgttacggcgactatcgacaaataagaaccaagcaaagtattgtccagatagtttgagtattttgatcactttgcaaataagttattgaaaatacactacctaaaatcactgcagccaatagacaccggctgattttcatcaataatctccccttttttatttttcgtagagagcattaagcttcctcgttcatgaaaataatcagcgacttcaatcgaaaaattttcaacatcagcaaacattttcctcgaagtcttggtattcttccttgcttagcagcactttctctgctttggcaaattggagtttgaggcattagtaactacctataaagatgaaaatatttgtgcgatgtctactgcagatgacttactttaggtaagtgggcagtttgtgggcagtagatcatttaaaaataagcacaaaaaaataccaaaggtggttaaacccttggtatcattgagatgcggccgagaggacttgaacctccacgggttattcacccactaggccctcaataaagtgatagcttatcaccagttacaaaaccccgtcatttcaagcatttgatgttattcattacatccatttacaccgttttttattgattttggacacaaaatggacactcactcactttcaaatatgagttattaaatagttatgtatctgctcacattcctaatatgtgtgtataactacgtatatatagttatacttgccatctaacaccaaagcgaaaaaacggatcgttcattataattttctctgtatcagtattataatctaaggcaggctctaaaggagaggtttccttacagatatcaaccattttatttaatgtatttactatgtgacttctagacataccctttactccaggaataagtaaatcgtttattacttttacaaaggatttaattgggatgtcctcatgatgtgctacttctgcaagtcctttaagaataatctcatatgagtctaactttgaaccatctttcatatcatacgaatttcttttttgacctttagtaacttttccgttttttaatttctctaataaggttacattagtttgaggcaatttggaataaatggttttcagatcatcgggttctaaattaattttatactgactatcacattgctctcgtactccatgttgtttgcaaaaatgtgcacaaatctcctgcataagataagggtttttaaagctgttctcaatgaaagatttaataacctctccttcaagaagaatatttaatttttcaaaaccggaagtaggtatgaattctagttccttttcttcccattcaggcactctaatgttattaatcctagcttccatatctctttcggctttcactacatcctcgcctctattaggaattaatataatacaaacatggagtttctccaatatgtatggttttaacttatgtattatttcagtttgttcgtgtgattctaaataatgaaaatcatcaaatactaatataaattcattatctattaaatactttgtcgtttgtttgagcaaactttttttatactcttgagtaacttcattttcacttatcatttcacctttaattcctgctgaactgttaaatttagctttaaaaaaatgaagaaatgatttcgccacagagacttctgcttcagcagaaatatgagcttcaacagcgtctttagttttaactgtattagtttcattactaggaacctcaattaaagatgctataacctcttctaaaattcccccttttaaatcactcggctgaataaagaccaccttgtcagccggcaagcattttttcgctaaaactgtttttccaattttagaagggcctgatagaactattatcttccctccatactctagttcgatttgaagatcattttcaagttttttttctttcctttcattgtatgtatattcgggaatcgaaccaggagtgaatacctcacttgcttttattttgctcatagaaatgcctccaattttttcataatttcctagtaatattatactctttttttacaaaaaaacacaaaaaaagaagaggataattcccctcctctttatgcaccaactcgatctgcggcaattttaaaactgtcatttgaagcactgtccacacctgcaaagtgaacaaacgttaaaatgctactcaacaccattactcccaatagaattcggctgatcttcattaataatctcccctcttttgatttttcgtcttgcttcaatactcatacgataaaatttgtttgaaagttctaattccccttctccataaaaataatcgcctatttcagttgcaaaattctccatgtcagcaaacatttttctgtcagcaaggtaagaaaatgcttcatcaattaattcatattcaccatttgaaaaataaagtccttctaaaattttaaattttgcaatgtattctttatcattcctattctctgcttcgcttcgtcctttaatgaaataattataagctatatcaaaattatgttttttggcatatacgtgagccatagcaaacaaagcttttgtcaaaaaactatgtttagatttttcaaaaatatctatcgacaatcccaaatggatagaagcattattataatcctttaactcttcataacaaatcccaatgttcatatgagacataccaatcagatgaggaattttggtgtactctgcaatttccaatgcattcaaaaattgttgcaacgctctttcaaattccaaagaatctatcaaatttcctgctactataaactgacagcgcaatgtttgaacagcgtattcatcgaacttctgaaatattttcaaagcacgactagcataattcatcgaaaagtaagtctgtttcatataataataaacgtatgaaactttgaaaaaaaactcagctttttctatttcatcttccacttcagaaagttttgtttcagcaatcctataagcacttattgccgttgttaattctttacgtctgaactcgtacatacctgtaaaaaagaaaaagtaatactcaagcatacccgttaattgcccttgctcttccatttcttttattgtttcatacgcactatttaaatcatcaatccttttcgattccatataactcaacattatctcgtgtcggaattcaagcaattgatagtataacaaagcgtcttgattttcttccagattcactaattctttttccacttcttttcttatatgctcagcctgttcaacttgatcatttttaataagagtataccaatcattcaatttttgagtgactaggtcgtacggaatttttctgttttcatccaagagaatccggtgcaagcaaattcctccaatgcaaaaaggtacgaatagtctattgaagaaattattcttttcgtctttattgcggttattgtaaggcttttgtgtcttgacacgtgatccataaataaagaaaaacaaaacacgctagaaaatgttctaacgtgtaaagattacttcattgtttactaaaactgaatcttttgaggaacgtgttcgaccgattacctcgggtcaatgcaaatacttgatggccgttttgtattaatttaggaagaagggaccgaccaattactccagtccccccggcaacaatgatcttcatgctataccttatttacctgctaatcttgaagcagcttcttcaacttctttatttgctttttgtaaaacatcctccggacttagtaaagctgttccttgcactcggataatttgataatcctcaataccgaggaaattgaacattgatttcaaatatttattagagtattcaacttcttcataccagtcatcatttgtataaattgatccgctggcttgtatgacaagcattcttcgtccatctttaagcagacctactgacccagtgtcagtatatttaaatgtttcgcgtgcgatcatgatattgtccatataatcttttaattttgatggaatattgaaattatgcaaaggcaaaacgatgacatacgtttttgcacttttgaattgtttcaatacttctgtcatgcgttctgttactttttgttcatcgcttgtcagttcttcgccctttccagccttatcccatgcgcttaaaactgttttatcaaccataggcacttcatcactatacaagttaatctgctcaagcttttcactctctggaattaattctatgtaagtttccaaaaagtgtttcattacccgtaaactatatgacaacgtatcatccacttttggatgtgcattaatgataagtgttttgctcatttaaaactctccttttattttatattaaagattaatttaatcgacgatcaattcggtctttaatataaaccctgcagtttattttgtcaaacggaacaaataatatactaaagaagggttttaagattgactatcatcaaaaatactcctaagatacaatgtgataacccttaaaatcaaaagcaggtgagtttatatgcagtacagtgttggggttgaatatgctttacattgtctggtttatttaatagatgttccctccaaggaaagtgtcgggattcgggatcttgcagagttccaaggactttcagaaacatttctttcaaaagttttcggtaaattatctaaagctggtattgtaaattctgtccccggtgtaaagggaggatacaggttagcaaaatccccagaagatatttccttttgggatgtaatagaggctgttgaaggaccaaaacccatttttcaatgtaaaaatattgtaagcaatggtctgctttatcgagacaaatgcaactcctgtgaatccagcaattcttcttgtacaattaacttggtaatgcttgaagcagaagaacagatgcgtaattatcttcgtaataaaacgctcgcatggttaaataaagaattggacgtagtattgcctaaaaaaacaaggacagatactcgggaatacttcataaaaaaaagctctgactaaattaattagtcagagctttttttgcttcaagatgcctttaaattacaagtcatattatgttttttcgttttccatctcggcgtttgaatttgtaaaaacaatgccgtacctattggtgcttctcttgcataagaaagcgcaaatgttatactcatattaaagattacattaatcgccgatttatatggtctcttttaaaaaaaacaacaatcttcttattttacagattaatttcaaaaaaggaaggagaaatgtaaaatgaaagcattaatgactctgtatcttaggctcgctttaggaattagctttttatcttctgtagccgatcgattcggaatatgggggacacctggcaagcctaatgtcgtatggggaaacattgaaattacacggattatgtcgctgccttaactccttttataccacatgctcttgtaccgatagcaggatggatagcaactatgtttgaaaccatcttaggaatacttttgatcattggtttcaaaacaagaataactgctgtattgagtggtgctatgttgattattttcgctctaggtttaacagtaggaacaggttttaagacttctcttgactattctgtattctctgcatctgcaggtgcattcatattaatttattttaaaagaataccctatagtatagatgctttactgatgaaaaaaactgcagaggctgaatcattttcactagagtcagacaaatagccctcaaactctaaaagatagggtaagaaatatcgaagcataaaaaaggagcagacataaagtctactccttaaatttcagtttcctcccctttaacttcttcataatcaggtgttttcttatacagaccaagtcggtcaccatcacccggcatatgtgccatttcctcataagaatctccaagcttctcataataagaataagcagtcagcttacgagaactttcttcaaaaaaaataccaagggcgtctacaacccttggtatcattgatgcggccgagaggacttatacctctacgggttactcacccgctgggccctcaacctagtgaaaacgtatcatgtattacataaaccttataaaaatcactgaaaatattagctttaaatttgtaattccagctaagacctaagaaaccactaacaaaagaagtaaagtggtctcgcccaataggtgcgatagttttttcttttggtagtatcttgacttgtccgattttgagaaaaaaagagtacgtattaatcttgaatagcacaaaaaacactacccttttcgttactttagagaaaggatagtgttttttggttttgcgggtatcggaaaatctttgctagtagcagtacctcaataaaagatcgcaaattccacttacctagctatatcaaggcttacttgtctgatttgggatgtatggggtacaaaagttgagttacaaacattattatccaaaagtatgtttactgtaattattttacatggtattatttatatcatgcatatgaaatatgtatgtataataaatgaaattaaaaggagtgcttgatcgtgaatcttaagtccattttcaaaggagtaacatcgactctgatagctggtgtaattgttggaacttgtactatacctgcttttgcggagtcgactacaagtgtatcgtcgaaaaattatgcagttacaagtggagtattcaaagctctagacagggaggtttcagaggacactgttgatcaatcaagctggagtcgggagttcgaattagatgagaatgacggagcacaagtaaacttctggatttcaaataacgggagtaatgacataaaaatatcaattgatggaaaagtctcaagaaccatcgcaccaggcaagcaaggcaacatttctgccgaggttaaaaatggttggtttggttggacatacaattacacatttacagcttcaccaacggctaaaggtggtagtgttaagatgaaatataaaattgctcaaagaaataattaacgaattacggaaaggtatcactcattacctttccgtaatttcatcattttttagttttttaaaagattccttactttctatactttggagataaatccactccagatttttcatcttctcttttctagaaataaaaggttttgtataaatcctatatgatgcatatcaaacccattagtaattacttttctccaattttcttctcctgcttttcctgctcttttcccctcagccttatgaaatattatcatgtcctatatttaagggttatacagcgctcgttatcattatttacaccttttttgatgttttttcttattttctggacagtaaatgggagtaaagagaccttgaccactcaccaagataagtaaaataaaaaacgaagggcatcaaactagacgacttactataagtaagtgggcagtaacagacaaatttctgcaaataaaaaataccaagagtgtctaaacccttggtatcattgatgcggccgagaggacttgaacctccacgggttattcacccactaggccctcaacctagcgcgtctgccattccgccacgaccgcgtgctatgaagctgtctttccactaagcatataaactagtgatgatgatcagcactttgaaaagaaagtgcgggtgaagggactcgaacccccacgtcgtaagacactagatcctaagtctagcgcgtctgccaattccgccacacccgcgtgacaagtggtgagccatgaaggactcgaaccttcgaccctctgattaaaagtcagatgctctaccaactgagctaatggctcgctctaaaagtgattcaaaattttaaaataaaatggctgggctagctggattcgaaccaacgcatgacggagtcaaagtccgttgccttaccgcttggctatagcccaacgaaggtaaatggtgacccgtacgggattcgaacccgtgttaccgccgtgaaagggcggtgtcttaaccgcttgaccaacgggccgtctggttgagaacttatctggcggagaaggagggatttgaaccctcgcgccgcttacgcgacctacacccttagcaggggcgcctcttcagccacttgagtacttctccatatggctccacaggcaggattcgaacctgcgaccgatcggttaacagccgatagctctaccactgagctactgtggaataatcagactttctttattataaatgatgcgacatattgtgtcaagaagcaacatttatttttttaagaaagtgtcgttgtctctcaacgacttttataatttaacataaaacattaaaatgagtcaagcctttttaaaaaattcttttgatttttcctctgcactttccgcaggcatatctttccggattcattgcccgcttctttatatactgttggccgcaagccgcgcatctatacatatatgttttcttttgtgtctttttgatttggagcggcgtgcagaatctcggcgctccgactttctgaagcagttctctgaagtctttgtctctgtgcttgtacccttttccttcaaggtgaagatggtaatggcacagctcgtgtttgatgatgcctaccagctcgctccgtccgtgttcgagcagatattttcggtttaattcaatgttatgagaagacagcatgtaccggccgcctgtcgttttcagccggtcattgaagaaggctctgtgacggaacggctttccgaaatcttgttcagagatgtcttccgtcagcttttgaagttgttcgttatccataagtgcaccccgctttaaaaacattgaacgggacaattcaccgttcgcatacaatgagttaaaaccgacctctaactaaaagctgaggaggaatgagccatgccgaattggctgatgaaacaaatgcaaaaagcgtttttagaaaaggacaattaccaaatcaaactgctgaatcagtgctggtatttctacagaaaaaaacactgctcgtaagcagtgcttttattttaccatagacagcgacactctgcctttttgcacgtccaccccttcaacccatacggtgacgatgtctccgaccgatacgacgtcgagaggatgtttgacgaattgattgctcagttttgaaatgtgcacaagcccgtcctgcttgacgccgatatcgacgaaagcgccgaagtctacaacgttgcggacggtgccctgcaattccattccttcctttaaatcctcaagctgcagaacgtcttttttcagcaaaggcttcggcacttcgtcacgaggatcgcgctccggccttgtcagctgcccgcaaatatccgcaagcgtaatttcccctataccgagctcttcagccgtttcagacagcggcaatgcgcttattttctcttttacgtccgcgcttccgatctgatccgcagtgagctgcagttttttgagcagcgcctttgtctctttatagctttccgggtgtatcccggtgcggtcgagcggctccggtcccccgggcactctcaaaaagccgatgcactgttcatatgtttttgcgccgagacgcggaatttctttcagttctttgcgatttgtaaatttgcctagttcatctctttttttgacgatattgccggcaacggttttggataacccggctacatattggagcagcgcggctgaagctgtattgacattcaccccgacttggttgacgacggtctctacgacaaaacggagagattcgtttaattgcttttggctgacatcgtgctggtattgcccgacgccgacggatttaggatcaatttttacaagctcggccagcgggtcctgcaacctccgcgcgatggagacggcgctgcgctcttcgacctgaaaatccggaaattcctcacgggcgatttctgacgcggaatacacgcttgctccggcctcattgacgatgacataataaatgtcacgctctgtttctttcagcacatcaacgacgaattgctctgtctcccgtgatgccgtgccgtttccgatcgccacaacctcgacttcgtaccgatccagcaattctttgatttttttccgggcttccgctgtcttttttacgggagcgtgcgggtaaatgacgtcgattttcagcacttttcccgtctcatcaacaactgccagtttgcaccccgtacggaaggccggatcgacgccgagcacaactttccccttcatcggcggctgcagcaggagcttacgcaggttttcagcgaaaatatgaatcgcctgcgcgtctgctttttctgacagctctttgcggatgtcacgctcaatagccggctggatcaggcgcttgtaactgtcctcaatggcttctttcagcgtttctatcacaggcgtttcacggtgtttgataatttgcttttctaaataagcttttatctgatcggcgggcggttcgatcgcaatctttaaaatgccttctttttcaccgcggttcatcgcaagcactctgtgaggaacgacctgttggatcggctcttcgtactcgtagtacatttcatagacgtttttctcgtcatcagcggctgacttgcctgccgcggaagtgagaattccttttttatacgtttcctggcggatccactttctgaaatgaggatcatccgagatttgttcggctatgatgtgcttcgcgccttcaatggcttcctctcttgaagcgacttctttttctgcactgatatattggtcagcgatgtcgtgaaagcggttttctttcgggagagaaagaatatagtccgcaagcggttcaagacctttgcttttggcgacggtggcttttgttttccgtttttgtttgaagggacggtataaatcctcgacttcctgaagcttgaccgcttgttcgattttttgcttcagcccttccgtcagcttgtcctgctcagagatcaatctgatgacttcttctttccgctgcgtcaggttttgtatgtattgccaccgctcggagattgcctgaatctgcacctcgtccattgagccggtctgctcttttcggtaccgcgcaataaacgggacggtattgccgtcttccagcaggcggatgacactttcgacatgtttttgggataacgctgtttcttcagcaatttgttttttcaaaagggctaacgtttccatatcacaaaagcctccatctcttcattctttctctagtgtatcaaaaaacggcggaacataaaaaaagcagccttacgataaaagctgccctagaatataggtcaaatcatcacgtctggatgttgtgtacggatgaagtgattttgatatatcttctattgagtgtccctgctttaagcaggtgcgaatatgcggaacctcaagcccatccgtgtagatgatgaacctcgcccctttttcgtatgatgacgtatacgttttgtatctttgcggtttgcctgagaggtaacccgaaatcggcagcggatgaaagacttcgcctgatggggagtgcaggaagaaacggacattgccgatcgagcagtatgtcaattcccttttgatgaaattgatttttaagatggaggcagtcgcccctcttttgtttttcatcgcttgattgcagcgctcaatgatgctttccacatcctcatccgcatacgtttccacgatgtctttaatggctgacgaggattcgttggcaagagatccgctgccgagaccgtccgctaccgcgcaaactaattcttcttcattcgccttcataaaaaagctgtcgccgcatatggacttgccttctttatttaattggtatacaagagtttgaacatgttcattttcttcaacctgaatcattacattagctccatggagggatctccaatcaaggcctctctcagttttttcaccgctttccgctgcaggcgcgagacgtgcatttgagatattccgagaatgtcccctgtttctttttggcttttattttgcacaaatgttagatcgataatttgtttttcgcggtcggacagcacatgaagcacgcttttgatcatcatctgctggttgacgcgttcgtatccttcctcctgcgaaccgacgatatctaaaatcgtgacggtgcttccgtccgcatccgcttcgatgctgtgatcgacagacagcgcctgatagctttttcccatctccatcgtttcaagcacttcctcttctgacacatcgagaaaggctgcgatttcttcgactttcggcgaccgctgcgtctctgtcgtcagctgatccaccgccattttaatgcgcggcccgagttctttaatccgtcgcgggacgtgtacgctccatgttttatctctgaggaagcgtttgatctcgccgatgatggtcggaatcgcaaatgcttcaaaggatttgccgacctcgggatcataccgtttaatggctccgagaagtccgatcatcccgacctggcggaggtcttcatgaaaactttttccttttgaatatttctttgccagcatttcgacgagattggtatacacctcgacgagtgtttcctgggcttctttattatcatgtgtttgaaagtcgcgtatgagccgatcaacttcatctttagttagtttcgtagtttttgatggttgtgccatgatcaactcgctccccatttaaatactttgtcatcgccacggttacgccagagttgctttgaactttgacttcatccatgagcgtttccattaaatacagaccgagccctccttctgacaattgatcgactgtgtgcgaaggagtgtacggcccgagatcctgctgcttctgatcaaaatcaaagctgtctccctgatcggcgacaatgacctccagccgatcctcaaacacaccgaaccgcacggatacttctcccttattttcatcgttgtatgcatgctggacagcgtttgtacaagcttcgctgacagcgatttttaaatcttcaatgtcatcataggtatagcccattctgcttgcgacccctgataacgtaagcctgacgattcctacatattccggttcggccggaattttcatctctatataatcaactgatgtactcattgcacgccaccttctgactttgccgaaatgtcgatgatgtccttaagccccgtaatttcaaacagacggacgagccggtcggaaagattctcaagcttcagagagccgccttccttgctcaccgttttaaacacgcctacaaaaacgcctaaacccgtactgtccatataatttacatcttttaagcagattctcatatctttcccctcgtttgccaggggcatcagcttttcacgaaccgccggagctgagtatacatcgatttctccagcgatattgatttgtatatctgaaagattctccttcatatctaccgttaaattcatcgtatcacctctgaaagttatccttactcgtgctaatggctttttacccgtgctgctgtttttttaaacctttctttttaaaacaattaacgtaaaatcgtcatgaagctgaaagtcctggagtctcagcaggctgtcgtaaatatttttgaccatatcctgcgcggagcagtccatgtgttcttccagcatgcgctgaatgtcgctgcgttctaagaaaccgttttcggtacggcattcggtgacgccgtcagaaaaaagaacgatcatgtctccttcgtccatgtgctgttcatattggctgtaatcaaaatcctgagagattcccagcaccaatccttttgcctccagatcataaaactttttttctttttcagagtagtagaagcccggttcatgccccgcagaggcatatgtaaattggtgatttttcgtattgtagtttgcgtaaaacatggtgataaacatgcttgagtccacgttctgttctacaacgcggttaaggtttttcagcacttgggaggggtgaatgccgatctccggaagagagtccatggcatacttgatcatcgacatgcacaatgcggcgggtattccttttccgatgacatcggctatcgcgatgttaatcgattccttgtctttgacaaagtgataatagtccccgctcatctgtttggcggggacgctgatcgccccgatatccagctcttcttcttcaggaatttttgtacccagcagcgtctgctgaacatttgcggcaatttcaatttccgaacgaagctcctgctggatatctctcagactttgatgttcctgataagccatcccgtagccaatcatgacttctattaaaaaatccagcgaatgaaaaacatcttccggcagatccggatacagttcctttactacttttcggtggatgctgataatctcctccggaggaacctgatgttcaatcgtttttcggctgaatttttgggcttgatataaagatgtttctgttaattcggctatatatcggctaagcagctgatgataccgctgctcaataacctccctgaaatccacgttctaacctcctaccgaagccatttcacggcttgaatctctgttccttcctctgcaacagattgcaggctgaattcgtccatcagccttttgacgcccggaagtcccgctcccagtccgcctgacgttgaaaagccgtcttccatcactttacggatgtcggggattccgggtcctttgtcttccgctataattttaaggccttttttccctctgtcgtttacttgttctatgctgacctggcccttgcctgcatataagtaaatgtttctggccaattctgagatagccgtcgtgattctggcctggtccaccgtgccgaagcctaattccttcgcaacgttgcggccaagctgtcttgcggctacgatatcccattctgtcatgattttcacacaggattggtcgttcatcgctattcccccaattcccgcttcaatgtctcaagcccttgctctaaatcgagcgccgtttcaatttcctcaagtgagattccgagttcaatcaatgtgaccgccacagccggctgaattcccgtcaatacgacctttgcgcccatcaatttagacatggtgatgacatcgccgagcactttcgcgataaatgaatcgatcatgtcaacggatgtcaggtcaatgacgactccgtttgcgccggtttcatagattttgttcagcagatcttcttgaaaatgcaaagctgtctggtcgtcaagttcccattggatggataccaataagcagttatacagtttcaggatcgggatttttggatgtctcacaatgttattcccccaatgaaacgatttttcgatttgtcatttcaagcgctgtttgaattcctttttgaagggtattcttcgtaataacctgcgacaaatcaattcccagattaacgatcgtctgcgcgatttccggacggattccgacgagcaggcatttcgcgccgacaagccgcaccgcttctgatgcctgaataatatggtgcgccaccatcgtatcaacgaccggcacgccggtaatatcaattaatacaacctgtgaacggtgcttcacgacgccgtttaacagattttccataatgtgctttgcacgctccgtatcaatcgtcccgacaagcggcatgaccgttacatgctcaaataccgggatcagcggagcggacagttcctgaagcgcgattttttgcaaagtaaccgttttttcccatgagatagaatactgatttaagatttccgtgttgatcggactgaaaaagctgtctatctccaatatcaattccgctctgtcctgatcggccatattaaggtcgaccatcgtttcgtaaagcagcttccaaaactctgacagggtggctgaaagaagtttcagtgacaggccgagctgaacggcgcgcagtgcgaggtcgctgatctgctcttccgcagcctcgtcatttttagtcgataataaaagaatgtctatatagtctttacaaatattttcacatatgtgattcgtaagctgatagtcttcctgattgcctacttcttttagtttggctgtccaagtatcaagcagttcatcatgctgatcaatgataaactgatacactttctgattcgacatgggtttcactgacctcccgacacaaaacaacaaagtttgtttgattatctctttattatagcgcttatgtttttcgaaaacaaaaaaagttgctctttatgagcaaccaaaatatgactaaaaatcaatgagtgccaaactgatttgcaaggcttcatcaaccttatccatcatttcatcatccagatgagttattttatccgttaatctttgcttgtcaatcgtccgaatttgctccagcaaaataacggaatctctttcaaaaccgtagcgttttgcatcaatttcgacgtgggttggtaatttcgctttctgtatttgggctgttatggctgcaacaatagcagtcgggctaaagcgatttccgatatcattctggatcactaaaaccgggcgtacgccgccttgctctgagccaacaacaggagataaatcagcaaaataaacatcgccgcgctttacaatcaaaatgattatcctccgctgactaagcgctcaacggtcgtttctgcttcgcactcagcatagtgagcctcagaagagatattcaagttgattttcgccatttccatatacccgcgtctcatcaaatcacggttatggcgagttgtccgttcgctgacatacgctctcactgcttgtgatatcagttcgtttctgcttcgtttctcccgcatcgctacaccatccaattcagctactaagttttcgggcaagctgattttcatttcggttcttgcgctggattcagacaaaaaacatacacctccaccaaacttacggatacgaccaattcatccatccagacataatgataccattattcaaacgtcaagcaaagctgttttataaattctctttttccggatgacggctacttgtttgtattatcttgcagtaaaggatttcttacttccattatactctcattttccaaaaacatacggggaacgcgggaactaatggtacaagggacctcgtaattaatcgtcccaagccgcccggcgatttcatccatcgtgatcgtttcttccttctggctgccgatcagggtgactttggtgcccggcggataagattgatctaattcgaccatcaattgatccatgcagattcttcctgcgatattcatccgtttgccgccgatcagcacagacgtgccgctcagcttgcggagccacccgtctgcatagccgatgggaaccgttccgatccattgatccttctctgccgtatatgttgcgccgtagctgacgctttcccctttgcggatctttttcacatgggataaaacagagtgcagcgcaaaagccggctttaattgaaacggaatttcgctttggatgtcagcagaaggacgaagcccgtacatactgatgccgaaacgaaccgcgttaaagaagccctttttaagacgaagtccggcagcgctgttcgcgcagtgcaccatcaattcttttaaagggagcggagcgatcaatattttaaagcggtcaaactggaagaggaaataatctctgtttttctcatccgcggtagcaaagtgggtgaatacgcctttacagactaaaccgggattttggctgaggatttttaacacgctttggatttcttcctccgttttgactccgagtctgttcatgccggtgtcgactttcagatgaaacggcactgtttcacttccgaggtggcgcgcagcttcctgaagccattcaacagaataccccgtgagtgttacgtcatactcggcagctgcttgtacatattcgggcggcacggcgccaagcacgagaatcggcgctgtaatgccccgctttctcaatgaaatcgcttcatccagtatggctacggcaagacaagaggcacccgcttcaagcgcggctttcccaacttccaaatctccgtggccgtaagcgttcgcctttacaaccgccatgagatggacgttttgcccgatgtgttttttcatatgcgtgacattttctttaatcgcggacaggttgatttccgcccacgtttctctgtaaaaggatgctgtgttcattcgatacacttcctagcattattttcaattcatattgttattatcatactaaaattattctgcaaagtgaaatggaatcaaaaaagagaccgacagcggcggcctcttttttgacgttattttgacgactgtccctgcatgcttttggcggcggccaccatttcatcttttgtcagatcctgtgatgacagaagataatccactccgtcatatgtccacgttaaagacgtatcagataatgcggccaccgtgaagccgagattaaccggttcgcctttcagcgtgacggcagaggcggcttttgcgatatgggctttttcttgaataagggtgaatgatttttctccgccgtaagtcatgacgatccgtttgccgtccgccgttgaaatatctttctcttcaagctttttgacgccggccggcacttgaagcggtgttttgaccgcaaatgaatcagacggcttggcgcttgtggcgacgtccatctgagaaagcgtcatatttttcttctcgtcaaaagagtctttatcgaacggcttgttgaattcaaagcttttgaattcgacttttaccatcactttccggtctgtatccatcactttgacgagcgacgggctcatgtcctttttgttgaaagtgatttcctgagtcggcagcattttgttgtgctgatagtttgtttttgtttcaaacgtgtactttttatctttggcggaatagacggcgtctttgtcatgctgcacgtcctttacaagtgactcaaacaaatatacttggctgctgttattcggccagtcgctttggaatctgaagctcttatttaacgacggcgtgaggacaaagactccgttggcgttccgtaaaatgacttggttttggtcttttttcggattttccagatagacccggtacagggaaggctttttatgccagatttccacattgtatacttgcggatcactccccgtttcaatggtcattttggctttcgctttgtacgaggtgtattctttcgccttcttatctaaaccgttcacgatatcttcctgtgatttttggccgcaggccgaaagaataaggacggcaagcagtcccgttaaaagcaaaacaaagctttttctcaccttttttcaaccccttcttctcaattgatgtaaagggaagaaatcgcttgtttgactttaacggtacgccctgaacggacggacgcgtaccataaaagcctcaaacaacttgtctcccttaatgcactatcaaatatatgaaggggttccggctaatatgcagactagcgtgacaacctttcaatcacgacctgtgccgcggcgtattcttttgtatgggtaatggagacgtgaatcgccgcgcagtcaagcttggcgcaggccagcacaggctttcccgctttgtcgtttccggtttcaatatcctgaaagctgagctctttgccgatacctgtgccgtatgctttcgaaaaggcttcttttgccgcaaatcttcccgcgagaaattcaattttccttttgtccgacagcaatgtaaaacgggcgtattcagcctccgtcaatattctttgcggaaacctcgcctgccggctgagcatgttttcaattctgtgcagttcaacgatgtcgattccgattccgaaaatcatgtgaattcctcctaaaagtccgtactaaaaaacggtttatgtcataaacgtgttactatatatgtaacaaatcagatgcaaaggggcttgcgatgtttatacgaacggaaaatttccagacttttatcagacgttatccggccgtcagctgtattttggcgctgcaggcgttcttgtggctgtttttcagtatgccgcttcattccgtcatgatgtggtcagatgctgtgaccggctataattacggcgtttccacgggagaatggtggcggctggtgacaccgatgtttttacacgcgaatttcactcaccttttgtttaactccatgtctctctttttattcgcgcccccgcttgagcagatgctcggaaaagtccgttttctgattgtgtacatcgcatcgggcattatcggcaatatcggcacgtatcttgccgaaccgcttgattatgtgcatgtcggcgcatccggcgcgatcttcggacttttcggcgtgtatgtgtttctgactgttttccgcaaggagctgatcggccgggatcagtcgaaaatgattatgaccctgcttatcatcgcggtgctgtcgacgtttatcaactctaatattaacattatggcgcatttgttcggactggcaggcggatttttgctttcctttttatgcgtgcagcaaaaaaagcggcggtattaaccgtccgctttttcatatgaataccagcgcccgatgcgttcggcatcttcctcgctgacatccttcagcatgacatgctccatgtggtgagctgatttcactgcggtagccacagatgcgagccgccttcttttttgcagaaaggagcggctgacttcaaacatctgcattcttcttctcagcataatcgtggtcgtcttcccgatcagcctcgtggtgatctgaagcctgccgccgtttatgcaccatgacgctgtcctaaacgaggcatatcctagcaccagttcgacaggaagcacgaggagcgatgcatatccccacggcttaaacagaatacaaagcgggatgatcacgaaaatcgagaagattatggagcggaataaataccggcgcagcgcccttttcggcaaatgattccggttttcctccagcacgtaatccggtgtgaaaccgttcagcatcactccgagctttgatttacggatgatcggaaacagaatcgtctgagctccttctttctcattccctgcactgccggcgctgacaatcgcaaccgtcgcgtatccgaataattgcctgatcacattttctttcattttaatggcttggattttacggagcgggattgtcacttgatgcttttcaataattcctctggtaatgaccaattcgtgttcctttttttctattttaaagttggcatgcttgatcatcataccggcgatgcttaacagccaggcgatgaacaatcctatgaaaatgatcacggcgtatatgccgatgctcgcatgcttgagaaaggaaaacctgtcatagagccagtccatcggaagtacttcatcaatctgagaaaagagggcgaataccgctgagatgatgacaccgattcccccggatgttgaggcggccataagcagctcacctacagacaggcggtaaacggattgcacatcttccccgcgcatcggttcctgctccgctgcggtctcccctcgttcttcttgctccgctttttgctgaaaaacagccgctctgatccgttccgcctcttccacagtaatggcggataagacggcttcagcgtttttcccgtcgccggccgtttcgatttgaagcttaacaagcttaaaaagctgctgaatgatgccggcactcgtattcattgattgaatccggtcaatggagatgtatctctttttcgtaaaaaacaagccttcttcaattctgaattctccgtcctcaatccggtatgtaaattttctccactcaatcacactagccgtaatcagccagataagcaggacggcgagcgcaatgcctccgtaaaagcgaatgaagtggttggagtttacaatatagacgagaaaaaatggcagaataatgtttttaatggtttcgataataatatggaataagttcaaaatcacggccgccggatgcagacgtttcggctcagacatcatcttccgtcacccttgccagacgggaaatggaatccctcagccggtcagcttcctccatatcaagcgccggaatggaatgaacggttgccgccgtggagattttgactgaggccagacggtaccttctgaggagcgggccttgtgaagtatctacgtgctgcaccctcaccatcggcacaatgacccgtttgacaataaaaatgccggattgaatatcaatttcattttcatggacttcatagcgccagatcctgtgcctgattttcggtatggcatagacggatatcactgaaccgaatatccaaatgatgccgaggactccggtgatccaatacggccaatggaagaaatggcttaaaacagctgctgctataacggccagaagacagaaggcggacaggatgatttcctgaagacgccagacttttaagccgcttggactgattcgattttttggctgtgctctcaacatacctacctcccattttttatcatacatacaaatacggctgatttgcaaaaaagattcactttccggcatatcaaaaaaaaagcggacccccgtaaaagggtccgcttcctgtgttttagtatgattttttctggcgtctgtcacctgaagaacggcggtcgcttgagcgttttttatcgtaggaagaacggttgttgtttttccctttgccgccgcggtagccgccgccttgaccgtctctgcgcttagaagtacgctggtttttatagcgtttgctgaccatcggcgcttcatcagtgaggcgtacaggcgtgctgtccggctcttttgtcgccattttaatggctgcagccacaactgtcactgcatcatgatcttctaacaattccgcagctgccgtcatgtagaagttcaggttgttttcgctgatcgccgtgcgcagacggtcaaccgtcacctgctgctgtccttctaatgcttcgtcaagcgtcggctctttcatgcggtccattttgcgttttgtcgtttgttcaatcgcgcgaagcatgcttttctcacgcggtgtgataaacgtcatcgccatacccgtttttcctgcacggcccgttcttccgatacggtgaacgtagctttcaggatcttgaggcacgtcaaagttgtaaacgtgggtaacgcctgagatatcaagtccgcgggcggcaacgtcagtcgctacaagcacttcgatcgcaccttctttaaatttacgaagcgcaaccatacgtttcgcctgcgttaagtcgccgtgaattccttcagctgcatatccgcgaaggttcagggcttcagcaagctcatcgacacggcgtttcgtacgtccgaatacgatcgcaagttccggagactgaatgtcaagaagacgagtcagcgtatcgaattttttgcgctcctgcacttccaagtagaactgctgaatgttggacacagtcatttctttcgcttttacttttacgtgttccggctcagtcatgaaacgctctgcgatccgtttgatcggcgcaggcattgttgctgagaataagagcgtttggtggtcgctcggcacgtttgagagaatggattcaatgtcatcaatgaatcccatgttcagcatttcatcagcctcatccatgacaaccgtattcacgttgtttaaacggatcgtgcggcggttgatatggtcaagaagacgccccggcgtacctacgatgatatgcgggtttttcttcaatgcgcggatctgacgtccgatatcctggccgccgtaaataggcagtactttcgcacgcttatcttgtccgattttatataactcttcagatacttgaatggctaattcacgggttggcgcgattacgattgcttgaatattaggagactcggggttcattttttcaacaaggggtataccgaacgcagctgttttacctgtacctgtttgcgcttgtccgatgacatctttatttaaaagtccgagcggaatcgtttgtgcctggatcggtgttgcttcttcaaatcccatacgattgattgatttcatgagatcagaacttaattggaaatcttgaaacgttatagtcaaattattcaaactccttctgattgctgtttcagtaatgtcgtgatttaccactaaaaaccgccctttcatccaaaggacaggatcatacgtatacaaagcccgaattactttacgtttaatcttaccattacactatgtgtttttcaataaggcgagatggtcaggcggccggaagcggcctgaccggattcttcccgcgaacgaggccggaccccgcgccggacgggatttcccagccggcggcctttctttttcaatacggacagaattatttcaccctgaattagtttcttcatttttgtatatttttataatgctgatcagtattttttcagttcttctctaataaatctttaacgatttcttcgagcttcatacctctcgatgctttaaacagaaggagatcgccggaagcggccatttcctgtatggcgtgaagcagttcttttttgtcaagataatggctgacgcgcccttcttcaaaatgccggcgcgctccgtcagcgatgaatgcgccgagtgtgccgtaagtaaatacatggtcgatttccgccggattgaccgcagctccgcattcttcgtggaatgctttttcttcatcacctagttcaagcatatcaccgagcacgagcattttcttccgatagcctttcatcgtttcgattaattcgaccgccgctttcattgacgtcgggctcgcattatacgcgtcgtttacgatcgagatgccgttgtccgttttgaccagttccaatctcatccccgtcaccttcaggcggctcagtcccagagcggcattttcccgcgtaatgccgaaatagatgccggcggcgtatgcggccatggcattcatcacattatgtctgccgagaaccggaataaagaaagaacggtcgattccgtcgatattgaagtacgtgccttcttccgcctgttttatttctttcaggcggagatcattgtccgcgcctgcgccgtatgtcgttgtccggcaagtgtacgtcttttcgcgaagcagcggctcatccccgaaataaaacagaacgccgtcttcccgaagtccgtttataatttcaagtttcgcctccgcaattccttctcttgagcctaaatcctgcatgtgggattcgccgatattggtaatgacggccgcttccggttcagcaagacggctcagaaaatcaatttcgcctctcgcgctcattcccatttctaaaacggcgatttctgtatcttcaggcatggcaagcacggtcagcggcaggccgatatggttgttgaaattgccggcggttttgtgaacgcggtactgcgtgccgagaacggcgtgaagcatgtctttcgttgtcgtttttccgttgctcccagtcaccccgataacccgtgtgccgagctctttcaaataagcttttgccaatgtttgcagcgcctccagcgtgtcatcgaccaggatgacagcacgctcttccggcggattcggttcagagcggtcccacaacaccgcggaaacgcctttttcaaatgcttgcggcacaaaggtgtggccgttaaaatgctcgccttttaaaggaatgaacagctgatttttttccaaagtccgcgtatcggttgcggcgccctcaatcattgtttgttcaaatacgggatttgtcagtgtgcctttgaccatatctgcgattcgttttacagttcgctttatcaaaggtggcacctcgctttctgaaaatgttgtctgttacgggaaaagacactgccccttcaggcagtgtccgtcttcattaaaatgtatgtttaatcagctgtttttcggcatggcgttcttttgccagctcaaccagctgttcgatcagatcactgtaatctacgcctgcttctttccaaagcagcgggaacatgctgaatggcgtaaagcccggcattgtgttcacttcgttaatgagcacttgaccgtcattggtcaggaagaaatcggcgcggacaaggcctgatccgtcaatcgctttgaaggctttaatcgccatctcgctgatttccgcatattgttcatccgtcacttgcgcgggaatcattaaatccgtgtcgccgtcttcatatttcgccttgtaatcgtaaaagtcggttttcggcgcgatttcaccgacggcggagcatttcggttcgtcatttccgagtacgccgatttcgatttctctgccggcgattccttcttccaccacaattttccggtcatactcaaaagccagttcgaaggctttttcaagctcttcacggtttctgcatttgctgattccgacgcttgatccgaggttcgccggtttgacgaagcatggatacccaagctcctcttcaacctgctgtaagcagctgtccggcgtctgtttccagtccttttttaagaaagcggcgtacttcgcctgcggaagccccgcttgagcgaacaaatgcttcatgatgactttatccatgccggctgatgatgcaagcaccccgttgccgacataaggaacgttcagcaattccagcagaccctgaatggtgccgtcttcaccgttcggtccgtggagaagcggaaatacgacatcgatcggcgccttttcgtcaggcgacgcttcaggaaacatttcccggttcaatgctgatagagcgaaactttcaccgttttgttccagctgaagcattttcacgttggaaaccggctcagtcagcagcgggcctctttgccattctcctttttcagtgatgtaaatcggatgtatatcaaacttctcagtattaagcgcttttgttacagctaatgctgtctgcagcgatacattgtgttcggctgactttccgccgtacaccaatcctagacttgttttcaatggatattccccccacaacaattcatctttactatcttatcactttcctcagaaaatgatctaattatttttgggcattctgaatatgaaagcatttgtatgtaattcctttttattttatattaaaatggcatggaaaaggagatgtgtcatatgaaaaaaatcagtacaacagaacaatttaatgaacttattcaatccgacaaggaaatcatcgtgaaatttttcgctgactggtgccctgactgcacgcgcatgaatatgttcatcggcgatattttggaagaatataatcaaaatgattggtatgagctgaacagagacgagctccctgagcttgccgacaaatatcaggtaatgggcataccgagccttctgatctttaaaaacggcgaaaagaaagcgcatcttcacagcgcaaacgcgaaaacgcccgaagaagtcacagaatttttatcacagcatatttaattcgtttcacgatctttgtttatgacttcaggctctacatgaacatggacatgagtcacatcatgttcatgttttattgcatattcgacctcatcggctacttcgtggccttctttcacagacagtcccggatctaccgtaatgaccatttccacatgaaccgtgctccccaaataccttgctttcacatccttcagcctgctgacctcttttatttctttcactgtgtgtttatacggctccaaatctttcagatcaaatccgtccgtcaatgagtgggatgcatctttgaagatgtcccatgccgtcttacagatgatgattccgatcagaaaagcaataaccggatcaatccacggcagatgaagccgggccgttaagacgcctataaacgccccaatactgacataggcgtcagaacggctgtctttcgccgccgcatgaagggcagaacttttaacccgatccgcaagtcggctgttatatacatacatgccgtacattacaatcgcgcttccgagcgccgtccatgccgcaatgaagctcggctcggcctccgttccgctgacaatcgcctttgctcctccgatcagcacttcaataccgaccgccatcataataaaagacgcaattaatgaagaaattgtttcagcccgataatgtccgtaagcatgatcactgtccgcggggcgctgggaaatccggagcccgatcagcacagccagtgatgcgacaatatccgtggcattatttaacccgtccgctctgagcgcttcggaatgataaataagaccgatcaccagtttgacggcggcaaggatgaggtacgcggcgatattaagaatcgcgcctttttcgccccgttttaagtttgccgtttgatcattcatgtaaggactcctccattctcattcatagtatggatggaaaagcggaaaaatagcagctttgatcagagcaaatgcaatattcgacagtattattccccgggaaactttttgtcgaaaaattggcggtatttttcctttacatatgaatatgcccattgtatactttcattaaatgataatgattctcaatatcattttattaggagggtaatcatgaggtcttctcctcagctcggatcatcagttgaaggacgaaaaaaacatctgatccatttgctgatcaataacggaatatacaaaaagtcggaacggcatttatatgaattatcgctcggagaattagaaagcgaatacaaatatgtaaggaaggtgcaggctcatggcgaaacgtaaaataaaaacatacgaacagctgataaaagaaaacaaggcggccattatgaataatcaaaagctgatgaatgtgatctatgacagaattgaccgcaagcatcaaaaactgctccggcacaacagccatacataaaaagagccattttcaggctcttttttttattgctcaaaggcttccgccgctaattttccgatgaccgcatcgtccatcggcggattgtgaaggccggcccgggcatcccgataataccgctgaagcggattgtttcgctccaggctttttgcgccggtgattctcattgctttatcaacaacagaaaggacggcatttgtcacaatatgttttgccgcgccgagctcgcttttgatgaaagggcggcgtttcgggtcatcatacatttgcgccgccgtgaagagaaactgtctcgcttttaacaattcaagctccatttccccaacacgctgcccaacggccggcacgtctttaatcggtccgttcaggctgttcggcgaatattcggatgcaaaccggacggcatagtcccttgccgcttgagcgatgcccagataagcagcgggaatgtgaagcagccagccattcactttcgccgctctcggcccgctgataagctccacaagccgctcgtcacggaccgtgacatgatctaaaaggagatcatggcttccggtcgccttcatggcaatcatatcccatgtttcttcgactgaaacgcctgactgatctttatgaatgagaaaaacaccggacgtttgtttttcttcaatccatgccgtcacaagcatataatccaaagtcagtgaaagggttgtaaaggtttttcggccattcagcacccattttccgtcttttttgacagcggaggtgccgggtcttcctcccctcgtcggactgccggtctgccgttccgtcgctgccctgttcaggacagctccctttttcacctcttctgtgataaatgaaaagacatcttcatcccagctgtttccttctccgagctcacccatgacggataaatgccagccgattccgagagcaacggccgcgtctccccgcgccagccgttcctgaaacagcaccatatcataaacggaaatgcctgcaccgccgaatacctcaggtaccgttaacgccgtatatcccgcgtcgcgcagtctttgaattttctccgcgggaaaacggcccgcctcatcatcaagcgcggctgttttttgaaattcgtctgcaagcaggccgattttttccatccattccctctgccgttcattctgtatccataaagacactggaatccccccattataattccgataaagttaataagtattatagagattcaagtctcgtttcgcaactgtgaggctgtacaaaaaaaacacgctattccatggaatagcgcgttcaggctgcttccgggccgcggtcctgcttaagcccgagataaatcagcatatatgtgagataacccatcgtcatcacaagcccgccaaagaaaaagcttgaaaaaatcggctcttcaaacgcggtaaccgccgcaagcacgatccagcttgcatacaggtagatgatgaaataacggaatcccgacttcattttatataagagaaacagccccactgtagaaaacaaacccagcgcaagcctgaaataaacaagatgttcgaattggaacatgaatgacacaaaggaaaaaccaagcaataacacaatcggtaatgcggtaataaaatttctcaagtgagcacctccgtcattacctttattataaatcaaaatagcataaattattgatttatcgtgatctttttcacaaaaatgtcattcctttactttatacccgaacatcgcgtttgcaaaagctccaccaagcgacggctaagaagaatacaatatggataatgataatgcctgcggaaaataacggcgtcattcccgcaaacagcggtttcgccccgctcatatattgcgtcaggtcagtatttgcgaacagcagaaaacttccccatttgttttggaagagcgacataatcgtcacgagtgattttgcgccatacagcacgataaatgacaaaatgacggccgttgcgctgtttcggaatacagaagaacacagcaagccaaagcatgccatcgcaaacgcctcgacccagttcgtgccgattactttcagggtgttcataagaagcgtccctgattcagatgtcaccgacacgccgaagaaagccatgccgaacagcagagacagaatatagtacgccgcatacaggtacaagctgaccaaaaatacggtaatgagtttagatacaaaaatccgctcccgctttaccgggcggattaacaaaaatttgatcgttttcttatcaaattcagcggaaatgatcgttgccgcgatcacgatcgttaatgcctcaagcagaatattcagcccgggcgcgtacgccatatagccgatgaaattctcatccgttccggaactgatgacaagccgtttaatgacaagcgccataataaattggagaacggccatcagaatcagcgccactaatgagacttttcggttaaagagtttcatatgctcattcgctgtcaatttaaacattcgtctccccctcctcttgaagcgccgtcgtcactttcatgaattcatcctccagcgattccgcatacggcatgatggaatacacgagaaagtcttgtccgacgagcgcacggtttaatgccgggatgtctttcttcgctacggtgacggtaatgcccccgccgtttttctccggagcaaattgctgttgggacagccattcgaatgcttcgtcagccggctgaatgtcgaggacggctttttcttctttttcctcagcgccgcgcagaacaacctctgttttgatctcacctttttgaatgatgatgacacggtcgcaaaggtcctccacttcacgcaataaatgcgtcgcaaaaaggatgctcgtcccttcaagctccgcgagttcctttaagtgatcgcggaaatccttcattccgccgggatcaagcccgtttgtcggttcatctaaaatgagcagattcggacggtgaagaatggcctgcgcaattccgagacgctgacgcatgccaagggaatacgttttaactttgtcatgaacggcattggtgagcccgacccgctcgatgacttcctgaagcctgtcctctttgatgtttttgtgcatgttggcaaagtgcttcagattttcccaccccgtcaggtacgggtagaattcaggattttccacgatcgctccgacggattcaagcgctttttcgaaatcagcatcgtgctgaaagccgttaattgtaatcgtgccgctgtttttctttaaaagaccgacgatgattcggataagtgtggtttttcccgacccgttcggaccgagcaaaccgatgatctcgccctgcctgacattcatgctgatgttttttaaaatgtgctttttgcctattgttttgtcaaggccttcaatatgtaaaatcggctcagtcatacagccttcctcctttttcacaaaaaataaacagtgcccgtacataggcactgtctgcattataacattagtcatatattcgtgaagagccggagccgacgttatgtcttatccgggaccgatccgtttttttccttctcttcattattgacgacatccagaatatcaagcaggaacacaaaaatcggaattccgataatcaagccccaaatgccgaagaaatgttccgagaaaatcagaactgtaaaagtaaaaaagatcggcagttccgttttcgctgacatcagtttcggattaaggaagtacgtctcaatcgcatggatgacgaaaatgaccagcacgatgtagatgacatacgctgcgccgcccgtcgtatacgcgatgatgctgagcggaatgagcgaaatcaccacacccgcaacgggaatgagcccgaggaaaaagaccatgattgacaggccgaacagctgcggaaaatgcagaatcgccaatgcgatcaaggtgaggatacagttcaccagcgcgataataaattgggcttcaagcactttgccgaatgttctcgcaaacttgctgccgaaataagcaagttcgtagtaaaaaacagacagcttgctgtgctgaaattttttcataaactccgtgagccgctttttctcgaacaggaaaaacatgctgagaatcagtgacatcacgacctgcaaaccgaaagtgctgatatcggccaagtatgtatacagtacattaaaaccttcttttacataggaaccgatattgatatcgccgaacacgctcgatatctcatcataaaacggaatgacatcgggatgatacgcgatgtgcttgatctgcttaatcagctgttcaatctgcttggcaacaatcgggtaaaagacaaagcctccgacagtcgccccgacagccagcgcaatatataaaacggtgatgaccaccctctggctgatccggaaaaaatggttcaacacgtgccggatgacagtctccagccgatccatcagaaaagtaaaaataaacgtaagcaaaatcaaattaatcatacttcggaatacaactaacaccccagtcaaaacaagaaaaacggaaaaacgtctgacacccggatgctgaaaaaatttaaaaatagccgccatttatacactcctgctaggacaaaaagcccttagatttcatctttcactctctaattgtaaattatataacaaaatgacgctaaggtctttgtccacctcctaataaatttaaacaaatttatcttttttactcatggcggccgaaaaaaagaacggcatgcccgatgcatgccgttcctttccttttataccgccgttttcatttctttaacggcctgtgtgcttttcgcttcgtcaaactcattttcgcttttggctacgatgatggtggcgattccgtttccgatcaggttgacgatcgcccttccttcactcataaagcggtcgacgccgaggagcagcgccagcccctccagcggaataacctgaagcgccgataaagtggaggcgagcacgataaatccgcttccggttacgcccgccgcaccttttgatgtcagcatcagcacgagaatgatcgtaacctgctggccgatggtaaggtcaacgccgaacacctgcgccagaaaaaccgtcgccatggacagataaatcgaggtgccgtccaggttaaaagaatatcccgtcggaatgacaagaccgacaaccgatttggaacagccgtagcgctccattttatccatcatccgcggaaggacggactcagaagagcttgtgccgagaacgatgagcagttcatctttaataaaacggagatagttccacaagctgaaaccgaatagtttgcaaatgatattcaaagcgacaaatacaaacaggaacatcgtaacgtatacagacagcatcagactcgccagcggcttgatggaatcaaggccgaagtgcccgatcgtataggccatggccccgaatgcgccgatcggcgccgcgcgcatgatgtagccgatgattttgaaaaaaacgtgcgacagtttatcgaagaaatcaataatgcttttgcctctttcaccgagcgccgccaggccgacaccgaataaaacagaaaagaataagacctgaagaatgtcgccttttgcgaaagcgtcaaccatatttgacggaacgatgtgagtgataaattcaatccagtcaatcccctgtcccccgttttgcgtgtactgagagacatcccctttttcaagcttgctgtaatcaagcccctcaccgggtttcatgatattgacgaccagaagtccgataataagggcgatggtggtcacgacttcaaaataaataaatgcttttcccccgactttgccgacttttttcatgtctcccatcttggcgatgccaagcacgatcgtcaggaatatgatcggtgcgataatcatttttaccgcattgataaatgtatcgccgagcggcttcatctgcttcccggcctcaggccatacgagtccgacaatgacgccgatgatcaccgccgtgatgacctgcaccgtaagatttttgaaaattttcatccctactcccccttgcctctcgctgcgtctatacaaaaatgatagcgttttcaaacaaagaggggaagcttatgatcataacggacattttggtctttttggtctcggctagcggacgaatttgtagcggttaaccggccggcccactcccccgtattgaatgtcgagcttaatctggccgtctttttcaagaaaatcaagataacgccgcgctgtcaccctggcgattccgagcgctttggcggcttcttcagctgaaagcggctccgtctgctgtttcatataggtcaaaatttcattcatcgtaaaatgatttaaccccttcggcagatcccgggacggattttgcggaattttaagcagcatgtcaagctgctcttgcgacatggtgtcatgctcttcaattttccgtttatattgtttatagttttcgagcgcctgtctcatccgctccagcttaaacggcttcaaaatatagtcggccgcaccgttttgcagcataagctggattgtttctttgtcttttgcggccgagacgatgatgacgtccacttcgagcttttgttttctgatttcctggagtgttttaattccgtcttttttcggcatgtatacgtctaataccacgagcccgggcctcagatcttttataagcctgattccctcgtctccgtcagctgctgtggcgatgacgctgaaccccgaaacaccggtgataaattctttattcacctcctgcaccatcggatcatcttcaataagcagcaccttgatgtccatcgaatgattcctcccccttcatcggaaataaaatagaaaatgccgttccctgtccctgccgtgtgtcgacttcaataatgcccatccctttgtcgacgatttgtttgacgaggtacaagccgtatcccgttcctcccgttttattgacggtaaaccctttgtcataaaggtgcgggatgtgctgatcggaaatcccgcttccgttgtcttctattaatatagcaagcacttcatcattttgctcgatactgatgtcaatatgtttgtcctccgtatccgctgtttcgaatgcgccgaacgcattttcaattaaattgccgagcaggacgacgatgtcatgctggtcgacatgctccggaaatgccgagaaactgctgttttcatcaattttcacagaaatgccaagctcttttcctcttttgattttgcttaacagcagtcccgccgcagcgtcattctgaatggcctgatgaagaaaatcggtgacgctttcttgttctgatgattccttaaaagcaagctggagcgctttttctgattttccgagctgaatcagtcccgcgatggtgtgaagcttgttcatatgttcatgattttgaactctgagcgcatcgacaaaatttttcacacctgtcagttcttccgccattttcgccgcttccgtcctgtcctgaaaaatggcgacggctccgatgaccttctttttcatgacgatcggaattctgctgctcatgatcacctttccgctgacttggatttcttcattatatacggctcggttccgctcgacgatttcagggaggcgcgaatcttttaacacgtcccagatcagcctgccgtctgtctcttgtctgacattgaatatctgcttcgctttttcattaaaaatagtgatgtgatgctgattatcgatcgcgatgacgccctcattcattgaatgaaacgtagcggtccgttcctcatacattctcacgatctcatggggctccagccaaaacatttgttttttgatgtggcgggccagcaaaaaggagccggccagtccgaacccgagcgccagcagaacgataaacagtatttcatgtttcagctgaagaagaatttcaccgaatccgggcagcgttttaccggccagaacgacgccgatctgattcaaatcccggtctttgatgggataaaaagcgcggacggcggtgccgatttctccctttgcttcggaaaaataaatgtgctcggcgaacgccgcggcttcgtcctcaccccttgaacgctttccgatcattgtgctgacgggatgtgaatagcggatatgatccatatccatgacgacgatgtaatccgcttcattgatgatccttatttcttcgaccgcatggcgcacgtcttccctttgttttttctgctccagggcgcgtttgacatcggtcatctcagataccgtccgcgcggtattcatcagccgttttttcagctcgcgctcctctgtatgctgaatatttccgatcagcacgatgccgacgatcaaaaaggtaaaaagcacgacgatatacgaaagtatggtgattttccagcggatggtgagcttttttttcgtcattggcctcttcctttccgtctctttacgaaaacggcccgcccgattatgcttgttatagaaaatggcggagggggttttcgatgaaaagcttgctgacttgtctcagcctgatggtactcggtatcggaaccgctttattcatcggctttcatgatcgtttctcaacggaagaaccgtattatgatgacgaacaggaaggcctgaaagatcaaatcgttttcaaatttagccatgtcgttgctgagaacacgccaaaagggcgggcggcgaataagtttgccgacctggtctatcaaaagtccggcggcaccattaaagtagaggtgtttccaaacgggagcctctattcggataatgaagaaataaacgccctccaaaacggggacgtgcaattcatcgctccctccacctcaaagctcggatcactgtctcccgaatggggtgttttggatctgccgtacgcgtttacaaactataaagccgtgcaagaaggcctcaacggcaaaatcggcacacgcctgttcgcttctttagaaaagcatcatttgaaaggtctggcgtactggacgaacgggtttaagcagcttacgtcaaataaaggaccgatcttcactccggacgatttgaaaggacaggcgctcaggatcatgccgagcagcgtgatcgaagaccaataccgtctgctcggcgcgcgcccgcggcaggattcctttaattccacgtttcagctcttggaaagcaatctcgtagacggagaagaaaatacgatttcaaatatctattctaaaaaattttataatgttcaagattatttgacaatcagcaatcacgggtacctcggttatgccgtgatgaccgacgagcatttctggaattcgcagacagaaaaaacgagaaccatcttaacggaggcgatgagagaaacgacggaatggaacgaagcctccgctgagaaaatgaataaagaccagcttgaagagataaagaagaattcatccattcatattcatgtgctgagcaaagcggaaaagaacacatggatgaaacgcctcgacccgatttacggacaatatgaacagatgatcggccgcgggcttgtgcaggatttgttatccttgcgccgcgagccttagcaggaccaatacgcccatctccgtttcatcccttttcccgccggggaagtaaatagggacagagcaaaaaaaggagatggagacatgtttacacatacgaaaaaactgcagcatccggctaaaccggatcgtcctgacccgctgttcgcaaaaaagatgcaggaaattttagggggacaatacggagaaatatccgtcgccatgcaatatttgttccaaggatggaatacacggggcaatgaaaaatataaggatcttctgatggataccgcgacggaagaaatcggccatgtcgaaatgatcgcgacgatgattgcgagactgttagaagacgccccgctggcagagcaggaaaaagcggctgatgatccggtcatcgggtccattttaggcgggatgaatccgcatcatgcaattgtctcaggactcggcgcaatgccggagagcagcacgggcgttccgtggagcgcaggctatatcgtcgcaagcggaaaccttctggcagacttccgcgccaatctgaacgccgaatcacaaggaaggcttcaagtcgcacgcctgtatgaaatgaccgatgataaaggcgtgaaagatatgctcagctttttattggcccgcgataccatgcatcaaaaccaatggcttgcggccattaaagaattagaagaacaggaaggtccgatcgttccttccacattcccgaaggcgctggaaaaacagtcattctcccataagcttattcatttctcagatggcggagaaagcgctgaacaaaattggctgaaggaaacagcgccggacggagaaccatttgaatacgaaaaggaaccgaaagcgcacggcgaaatagctaagctggatcccgtcccgccgtatgtccacaacacgcttcccggacgcgagtaaagacacaagcccaaaacaaactgttttgggctttcattatgccttcagaaccgtccagtccggttcgtatcggatgtccgggtgatgtaacagctcgtgaatgacatgttcatcctcttcatacagcatcacttctattgaaagaatcgcagccttctgctcgttttcttcgtatattcggtcatgttcgttctccataaaatcatcataggcctgtctgttctcccaaacgctgataatctctgcgatgaacaggccgtctgcgtttttccgccacccgccggcctgtttgacgaagccatttacacatgataatgctccccaccttgactgtgcttgcgcaaatgcttcagcgtttgcagcgtctgtttcacatacaatctttttgatcagcatgacgttcctctgtgatgactgttttcgcacgcgtatgctcaacacacagattcacggttctgacgtaagagcgggtgcggtgaatcgtgcctttcgggatgagcaggctgtcatttgctttgagcactgcggtttctttgtccttaaaatcgatcagcagctcaccttccagaacgatgaaccattcatctgagtcagggtgatggtgccagtcatattctcccgtaaacactgcgaggcgcacacagtggtcattgatctccgcgattgaaaaattgtcgtgtttttctttgactttattggcgatagcgagcaaattcagcatgtcagacacgagtgaaaaacccctttttcattttattgtatctcaacggcggctcagatcaagattttcccaaaataaaaagcgatccagctgatgcgccggatcgcttttgatctgcaggttgtctgccttttatgcttttattagctgcttcgtctgtttccgcctttttggccgatttccttataaaaatctttgtcatgatttttacttgtggcttctccacctttttggccgatttcttgatagaattccttgtcatggttattgctagtggcttctccgcctttttcaccgatttcctgatagaattctttgtcgtgatttttgcttgttgcttctccgcctttttcaccgatctcctgatagaattctttgtcgtgatttttgcttgtggcttctccgcctttttgaccaatttcctgatagaattctttgtcatggttattgcttgtcgcttctccgccttttttacctgcttcttctctgctcattttgttattatcttgtgccatttttgaattcctcctttaattggtgttggttgttggtttcccgatttcagaactgctaaacaaagaaaacacattgaatgtgttttcgggcggttttttatcattctgtatccttcatgcgttttagaatccggcgttttttataaagcatgatgcctgtttccgcgatgctttctaaagctgaacggttggcggacgcgccgaagatgatacctgcggccggaaccatttgcagcagttttttcgcggcgaacgtatcgcgatagctgtaaacgacttcccgccagccttggatttgcgaggcgacgcgctgataggcgcggtcgttttgatcatattgccgtaaatcttgcaggatcgctttttttccgatgacgtcactggatacaagctggagcaatttgacgataaacacgcgttctttcttgtctttcggatcaaagccgtaagcaaccgcgatatcctgcagcgtctttaaggacaggccgagcatcgccggaatgtctgccgccagcgtgaatacgccgccgactcccgttgcggctccctgcaccgtcgcggcctttacgcttgtacgcgctacggcttctgcgatttcgtccatgacggcaagcggcgcaatgcggatgtcgtgaagcgtttgacatgtaccgtgcggcagccgtttttgaaacttattcatgatgcgcttttcagatgtcaggtactgtccgcctgactgaataaacgttcccgtttcatcgagaatgagtccgattttcctctgaataaattgcggtgtcagcttgtccaaaagctgaaacggcaagcgggtgaatgtttgccagaacatcaccctctgctgcgccttttcccatttttgaatgtctctcagttgtctttccaggtctgtccgctcttctgtcacccgtcctgcacgtcctttctgatttctttgttcatagtatacctttatggcgttttctttttacacccggccggattttttatccggaaaacattccattgtttaattttcttcaaattctgtatattgtataattttgaataatacgattgaaggagaatgttgaatgcaatggatttatttaagtttagcgatcatttttgaagtattgggtacggtcagcatgaaattatcaaatggatttacaaaacttgtcccaagtattttattattattgttttatatcggcagcctttgttttcttactttgactttgaaatatataagtgtctccatcgcgtatgcggtctggtcggggatggggatcgtgctgatttccatgatcggaatttttttctttcatgaacagttctctgtcataaaagccgcctctgttcttctgatcatcatcggtgtcgtttccttaaactttatttctgaaagtgaaacgtcatcaaacggcatcagcgttcatacggacagaaacagatgatgaaagggttaaaggttctcttcctcattacagatattggatttatcgtttattggattgttactttttttgagtggattccaaaaaacatggtgtttaaagattatgataacgccatgatcatggcctggaactggtcattctttcccttagatattttcatttcgataaccgggctgtacagcttgtttctttataaacggaaacatgcgttatggcgctctttcgcattaatatcacttgtgctgaccttttgttcaggcctgcaagcgatagccttttgggtatttatcggtgattttgatcttatgtggtgggcattcaatctgtacttgcttctttatcctttatattttattcagaaattgctggtctctcgtaaaactagctgtcattctttttgataaggcggttttctttttcttcaggcgggaaacacttttcataaaggagtgatagacatgccttggtctatgaaggattatccgcaatcattgaagaatctcgaggaacctgtgaagaaaaaagcgatcgaaatcgcgaatgcgatggtagatgagggttatgaagaaggacgggccattcccattgcgacaagtcaggcgaaagagtggaaaaaaaaacgcttctaaggaagaaatcgatcagctgatgaaacacgatgatgaaacgaaacgcggaaattgaatcggaataaaggaaaaaccccgctctcaagagaacgaggtttttctgattataaaccgtaataataagatagtgtggtgactgaaacgtagcctgtcgctcctgcatacgtgactttcagccatttattggaattggtgtagtggccttgaacatattctccggttacccaagaacctgtaatttttttaccgcttgagaatgttgtgatcgttgaacagctgaccttagagcatgagcgcatattagcaccgtaaataccgactgtgcccccgctggctaaaatggaaacgtccggttcagctttaggtttgaaagctgctgctgatgcagagccgccaaaagcgaataaagaaacagcaaaaatcatggctaaagaaatgatcgacaaacgacgtaccaagaaaattccccctcttttatcatatggccggaaagctttcctgacgttattatacttttttgcccgggagactgaaataagtctaatgctccaacttcttttcttcgcaagtgaccatgccgattcttttttttgatagataacagcggtttattggactggaatcactgatatatcgttgattcaaacgtttattcagagcggccggagtttttccggaggtcatttgaatggtacagaaaggttttatcttccaatggaaagaaacattattattctatttacccgggaaaacggaggaaatacagcgtctttttctcaggatcagttgcaccggacagaaagttgtgaagtgatatgggcaagtgtcctcttttcaccttttaaaaaaaacgctccacgcatccgcgcatgatcggacgcggaaacacgctttgcgaacggcatcgcttctttcccggaacgatgccgttttcattttcggacctttcttcggcgggatacatatcatagataaaacagggcatcaatgtacctgtttattgaacataaagaacttgacatctcataatagcggatttatgatgtagataaaataatttgcatctaggaaactttttgttatttagctaaaaatctatcggaatttaggtgagacataatgagcaaagacatctcagcacaatcactgcaatcaaaagccgtgcaggatgcacttgacggcaaaagcaagggattcaaacggcttctgccttttttaggccccgcctttatcgcggcgattgcctacattgatccgggaaacttcgctacgaatatctcagctggttcgaaatatgggtatatgctgctgtgggtcatcctcttttcaaacttgatggcttttttaattcaagttctttccgcgaagctcggcattgccacgggtaaaaaccttccggaaatcgccagagaccggtatccgaaatgggtatccgccgggctgtggatacagggtgaactggtgattatggcaactgatctggcagaatttatcggggcggcgctcgggctcaacctgctgttcggcataccgatggttgaagcggccattatcgcggcgatcggatcattcgcgattttagagctgcagcgcaggggttaccgggcgctggaagcgggcatcgccggacttctgtttgttgtggtgatcgccttcgctctgcaaaccttctttgccaaacctgacgccgcctccgttctcgaagggctgtttatcccgaaaattgacggaatggacagtgtgctcttggcaaccgggatactcggcgcaaccgtgatgccgcatgccatttacttacattccgcactgacacagcgccgtgtcgtcggaaaaacggatagtgagcggaaaaagatttttagattcgagacgattgacatacttatcgcgatggtgatcgccggggcgattaacgcaagcatgctcatcgtcgctgccgcgcttttcttcaagaacgggctgtatgtagaagatttagacgtggcttatcagcaattcggccactatatcggaccggcttcagccattctcttcgggatcgggctgctggccgcagggctttcaagctcttctgtcggcacattgtcaggcgatattatcatgcagggcttcatccgttaccgtatcccgctttatttgcggcgtttcattaccatcattccgccgatgatcatcattatctcgggggtcaacgccacagaagcgctcgtatggagccaggtcgttctttcattcggcatcgcctttgcgctcgtgccgctgattatgtttacaagcaacaaacgcctgatgggcgccctgacgaaccgaaaatgggtgacggctctcgcctggctgattgcggttttggtgatcgcgcttaatctgtttgtgatctacgattccttccgttagaaaaaaaccggccatagcggccggtttttcttttggcgccgggtgccgttcgtatctttttccgggcgtttttggtatgatagaagaaaaatcggagttttgcttatgtcagtatttatccttttttatctgtggattgtgccgattgtcatcggcatcttctgttctctttttgcttatcggacaacgggtaagaaacgtctgattcccggctttttgatgatcgcattaagcatcgtttccttaatcacggggctttggatcggcggggtgaactatcatgtgttcatcgggggcatgtttttattcggtacgttattggccggctccgccttcccgtttttcttcgctctttcacgcaaacgaaaataaacaggcatgccgcctgtttatttttattcattaaccctgaattataaaccgctccgataatgtgattccgcctcaatcagcctgtacatgtgttatataggcttcagcccatgtcccatcatcgaaactgcagccaaaatgaatcctgctaaagaagattttgaattataagaaaaatactgtatgaaaatcctatttaccccaaaaatacctattgatagaatggtatctgagaggggaaatgttcaaagcggatcatatcggtcccgcctaaatacatagactttcatttctctctacactacatttctaaaggaggatttcccattagacacgcagctaaaggcattctgtttgccgcatctttagcccttgtaactactacttttgtccccgcatccttagctaaagaaaatcataataatactgccaatgccactggaacgaccaaatcatttttttatcagactgatacgcaattttcctacggacttaaagcacaaagcgatgcatctgtgtcaaaaccagtcaaagatgtaatcagagaagtgctgaaaaataaaacaaaattattcaatcttgttgaaaaattagcaggaaagaaaataagaaatgaactcgaatccgttttcaatgaacacatcgaaccggttttaaagaaaatgctgaacgagtatgtcgccttaagctggactgacgtggaaaagaatctttatctttcacttaaaaagtccggactttctgacagccaggctaaaaacctcgctcaattgacaactttagcaatgaaagcattttaaaatcattcataaatgatcgtcaggaaaatacgtatgaagtaatgcaaagtgctgttagattcactctaatagcactttttcattggagatggcacatgactgtcttttttactgttctgctcactttcttatgctgccttgtgatttcatctcttatttttatgattctattaaaaaaagagatcgtggatacaccgccaaaccgcttagctcatgcagcattcatcttacttattggattctccctgttcttcgctataactgtacccagcctagttatgtattttgcagctataactgtaaatcattttttcggagaatatatcatctatggttcactttcagacttatacatattttctgtcgtcgtcagtattttagctttagtttatatgctaatccttacggcaattgtaaaaggaatgactcatgttttgacattgcctgcttggtcagcctatatccttgaattcatttttgcatgggctgctgtttacttctcaatccaatacgtttccaatcatatcattgagaacatatctatatttcaaggtggagaagtgcttctttcattgttcatcactttcttattttcgggattggatatccttttcactaatttggataagatcacaaaagagaaattaggctaagggggtaacaaatatgagaatcatgacatatatatcctatttttctatttctttagttttgcaggtggtatggctgctattaataaaaagaacctctaatatatctctgatagatatgactacggtgtccttcttattcaccctctttatgttcatcttagatcaaatgttcaaaaaaaagcggacaaattagcgactgttttttaataatcctcgggcttctctttcgttttgaaatgattccggatctggggatgttacggtgagccattcattaatgaataacaccagcctctttaaaatacttcttcttttatataacatcctgacttttccgtcatatattcaaacgaaaaaactgcaatagggagtaatgaaacatgatattgtttattggcaagttcatgttgctctttttactctgttcgctggcgtatttgtttaaaattgtttattacaatatagggaagaacattgcgcttaaaaccccgaaagggacaaagacaaaccggacggcacgtgtgtttgtcaaaaatggaactacactgaatgagggagattactttatgatcgctgttgtgaccgctctctggctgttcttgagatgaattgcactggtccttcataagttttttgatcagccatcgctcgccagccgtggcttttcacaatctccgttttcgtttaggacggctatatgcaagccaagtcgctcaacaaacaaaggagctgtcgagatcttctcgatagctcctttgtttttccttgaatgattgaagaaaggcttaaaaatggacggtttctttctcatgcatgcatcgttcaagaaaacacttcacagcaaaacggaaaggtgaacgcaatacactcagcggttaagaaccatatgaggctgcgtatgttgattactggataagaaaaagaaatcccccagtcttaaaaggtggaggtcaaaaattggagaacacttaaatatttatagctttttcagcgatgtggaaagttccagaatcactcatttcagcagtataaacatttgttacacttaataatccagtaaaaagaataccgattaaagcggagctgattataaccttcttcattatatagcctccgtaaccttaagtatttgtgtttgggcatgtatggttttctttaaaaagtttcttccctctgcatagtttctcttctcaaaatgaaagtcacctaattgttcagttagctctgcgaaatcagaccaaaggcgtttctcttctaagtagcctaagctttgtttcactgctgtttcattatattcttcgtataatgaattaatgatttttaatttcgccaaatattcttcttcattagaagtccgagcacgatttaaagccgtttgtatcaatatgttctttcacgtctattgcctttttgaaattctcttcagcagcaatcaaattttcccctcttaaataaactaagcctaagttatgaaagatcacccgataatccttttcactttttcctcttccaacccacgggcgatacttaatgcttcccgataatatgattctgcttccgtcagcctgtacatatcgtacatgttagcaccgaccatcatattacagccaatcactttcactttgtataattgatttttttcaaacaattgcttggcttttttcaaatgattgagggaaacaaagtgctgatcaatttgataataggcatcagctattttgtaatgaaattcagcttgctccatttcatctgatacagcattcaactctctctctgctttgcgataatagcttatcgcatcaacatactctttatgatcaaattcatacattccacgaaaaaataatgagtaatacttcaagaggcctgtaagtcttttttgcggcttttctattttttcaagcagttcgtcgactgtggggcgatctcgatatctgtcttccggctccaaggaatctaacatcaattggtgacgaaagcacatcaatgaataaaaaacaagcaaatcctgatcctcttccatctcctctatttcctgttcgacctcagcctttaaaatctcagcatcaggcacactgaactggcgaatcattttgtaccattcattgatcttgacaccaacttgggacgacggcaaaacttgatccatatatacctctccctctaatcactatttttgtaatattataactatttgaacataaagtgaaaacgaaaaaaaaccgcaatttacttttgcgtcatactcacctgattaacttgtttttaagacacagggaaattatacctcaacataaaaatactgtataaaaatactatttacccaaaaaatacctattgatagaatggtttctgaaggaggtggaaaaatattcaaagcgaataatataggactatcctaaatacatagtctttcatttcgctggcagattacattcctaaaggaggatttttcattaaacacgtagctaacggtattctattcgccacatctttagcccttgtaactgcttcttttgtccccacatcctgagctgaagaaaaccgagatatcactactaatgccactggaattaccaaaccaattttttataataattgataagccgttttccttttagcttaaactggttttaaagaagctattaaacgaatatgttgccttgagttgtattgacgtggagagaatctttatctttcacttaaaaagtctggactttctgacaaggctaaaagcctcgctcattggacaacgttagcgatgaaacattttattgttattcataaattattaggaggaaaatatatatgaagaagaaagtaatccctgtagttttaagcgcaactctacttacatcattcttgggtacttcaggtgctttagcagctgaaaacagaaccacaactcctgtaccggtaacgaaaactgcaccaggtactattccaactggaatgcctggcactattccaaccaaagcggctctcaatggtgactaccaaacccaaggtgtagtttcgtggtcctataaggctttcagagctgcctgccgttcaggtggatggcttttatcaaaagccttaaagccattctcccctaaagctgcggcatggattagaaaaaactctaagaaggttgccgacattatggataaaggtgaaaattggggtgtaaaacaatttacaaaagcttttaaagctatcggagctcctacagatgtagctaccactttagctaaattcattgttgctttgatttaacatatttaaaatttaaagtgctgttagattcactctaatagcactttttcattggaggttaacatggctatctttattaccgtattgctcaccatactatgctgtcttgttatttcatctcttatttttatgattctattaaaaaaggagattgtggatacaccacccaaccacttagctcatgtagcattcatagggcttattggattctccctgttcttcgctataactgtacctagcctagttatttattttgtagctataactgtaaatcattttttcggagagtatatcatctatggttcactttcagacttatacatattttctgttgtcgtaagtattttagctttaatttatatgctaatccttatggcaattgtaaaaggaattactcatatttttaaattacctgcttggttagcctatatacttgaattcatttttgcatgggctgctgtttacttctcaattaaatatgtttccagtaatttcattgaaaacatatctatatttcaaggtggagaaattcttctttcattcttcataactttcttattttcgggcctggatatactttttactaatttggataagatctcaaaagagaaattaggctaataaaaagaaaagcaggcaatttagagcctgcttttttattccctttttaacatttctccaagccttgctttcgttttcggcccgtaaatgccgtcagcaggcagtccatacatggactggaatcgtttgaccgcgtttgctgttttcgaaccgtaatagccatctattccgttgttctttgcccctttgtccggataataatagagagctgccaaagctgtctggatctgtttcacggccgttcccttagttaaggggcttgtcactttaaaaacgcccgatggcagcgtgtaagatgatttttttccttttgttggagagctggccgagtccgtcagctttaatacttggccgactttgataaaattcgggtccttgatactgttcaatctctggatggtggccatgtttacggcagttttctgtgcaattacagggaggacatctcccttcttgacggtgtacgtcgccacgccagtctttgttcctgtttttgctgataagggctgtgcgatgctaatgtgcgaaccacgtttgttatgaactgtcctggccctccaaaagcttttttatcagccatcgcttgctagctgcagattttacgattttctttaccgtttccgcagattttaatacgatatactttcggttacggttcccgtcctctaagcttccaagcgggttcaaactgctgaccacttccttaccatggaaggggtcagtaaagaaataatcatcaataagaaagcctaaaaaaataaacaggcatgctgcctgtttatttttttataaccgccggcttcttaaaacagccgttttaagcttttcttgagtgacggcatttcgattttttggttttcaaagaagtttttcagcatgtatttgctgaagcccttcgcttggccgtaagtgatttttcccggaagcggcggctcgtcgccgatgacggcgtcgatgacgaccggctcatttgagttgagcgcttcatgaaaagcgggagccaattcctcgtgtttcgtcactttgatgccttttgctccgcagctttctgcaaaagcggcgtaatccatattttgcagctgggtgacgtagtcaatgttgcctttgacccgctgttcatattcaatcatgcctaaattttcgttgtttaatatgacaaccgtaatcggcagtttatatttaacagccgtcggcaggtcctgcatcaccattgaaaatccgccgtctccgcaaatggcgatggactgccgttcaggttcggcaaggcttgcggcaatcgctcccggaagcccgcatcccatcgtggcgagccagcttgagacgataaagtcctgcttcttcatcttaaaatggcgggccatccacaccgtaaccgttccgacatccaccgacaggacggcgtcctctgcggcggcatcctgaagccgggcaatgacctgctgcggcttgagcggatgagtcgcttcggtttcatccttttcgatttccttccaccaatgcttcatgtgctcggtgcaggcgtccaaaaatcttctgtcttctttatattcaatgtattccgtcagctctttcagtcccagagccgcatcactgacgattcccgcattgacgggatagcgcttcccgattttcgccggatccgaatcaagctgaatagcaggcgtatcatccgggagataatccctgtatgggaacgacgtaccgagcatgatcagcagatcgcattcctccattgcttcgtaggcgggctttgtgccgatttgcccgagattcccgagaaagtggggatggctgtcaggcacgacgccttttgccggaagggtaatgacaatcggagcggccgctttatcggcgaatgcgagcagctcctcttttgccgattttaacccttggccggcgagaatgaccggtttttttgcgttgttaatatattgcgcgcatgtcacgagatgttcttttttcggctctatatcggctttgaggtatatcggcgatgtgtaaaccggctcccgtttgattttttgcgcgaataaatcatcagaaacggttaaaacggcaacgccttttttgctgtaagccgtgcggatcgcctgattcagaagatcgggcagcgcttctgccgtatgtacttgctggttgaacaccgccacgtcctcaaacatttgctctaatttgatttcctgaaagctgtcacggccgatttcatctgaggcaacctgtcccgcaatcgccagcaccggaacaccgtccgctttggcgtcgtataaaccgttcagcagatgaacggcccccggtcctgcgattgaaaggcagacaccgatctgcccggtcagttttgcctcagccgcggcggccagggctgcgacttcttcgtgccgggtttggatgaatgtcaggttattccgttcatgtctcagttcttcgataaattcattaatgctgtctccgggaatgccgtatatatgaccgactccccattgttcaagcagctccgtcattacgtgtcctgctgttttacttggcatactgcatcctccttttacctgtattcatcccctttttcatacgggttgaaacacgggctatactctcagcttttttctcagcagatcaaggatggataacagatttcggtctttaaggactgccttacgatttgccgccccattgagtccgtcttttatttggagtttcctgttcggcaccatgaacagcggcagccggtttggggaaaaccagcgtaatgcggcggtttccggcccgttcatcagcggtgttcctccggtaatggctccgatgaagacatgttgtgtatcttcaaatgccggcctttcatactcaccggctttttttatgatggtcacgttataaccggtttcttcgaaggaaggcctctcttacggctgcggattcaggtgtttcaccttctgcgatcctgcccccgggcaaatcccataagggaatgtctttccgttttacgagcaatatgccccgcccgtcattttgaatgataacaaaagcgccttgagccatggcgtcctcctttacaaaaaagaccgcggcatttcagcctgcggtctttgccgttactttttaaaatgatacggcagggtggcgacgattatgtccttcttccaaaacagccggactcggagcaagaaggctgattggttgtgaaggatggtctgccagcgttttttcgtaatgaattgcggaaacagcaccatcacggagaactgttcttttttcgctttttgttcgaccgtttccaaaaatttatcaaacgggtgaaccagactgcggtatgaggaatgcagggtgacgaggcggacgccgttatgaagctcttcccagcgcttttccacctttttttcgttttctctgtcaaaggaaacatgaaccgcaatgacctgatccgataatgatttcgcatactgaatcgatttttggacgacggtggtgacaccggcgacaggcacgatgacgacggttcccctgatttcctcaggctgctgatcaacgacccgcagctgttcgccgaccgcggtgtagtgatttttaatgacgaaaaacagcatgacgacagcaggcatgaataacagcaccggccagacaagattgaacttcgtcgcgaataaaatacacagcaccataaatgaaatggcggcgccgcatgagttaatcagcatttttaccgcccagcccttcggcttctgcctgatccacttgatgcacattcccgtctgcgacagcgtaaacggaatgaacacgccgacggcataaagcggaattaaatgttccgtgcggccgccgaataaaagaatgagcaggatggacgcgataccgagaaagatgatgccgtttgaaaagcctaaccggtcgcctcgtaccgtaaacattctcggcatatactgatcgcgcgctaaattaaacgccagctgcggaaatgcggaaaagcccgtattcgccgcaagcacgagaatcaatgatgtaacgccttgaatgaaataatacaccgtatggcggccgaatgtttccgcggcgatttgtgaaataacggtctcgttaggcttcggacccgtgccgtagccgtacgccagcaccgtaatccccgtaaataagatcgccagcagaatccccatcatggccaaagtgcgggccgcgttttttgccggaggatttttaaaggccgggatcgcgtttgaaatggcttcaacaccggtcagcgccgaacaccctgaagaaaaggccttcagcagcaaaaacagcgtgatgcccgccacgggcgtgccgattggtgtatgctcggccggatgaacctggcccgtcatgagcttaaacagcccgacgacgatcaaaaggacaagcgccgccacaaacagatagacgggatacgccaaaatggacgccgattctgacagccctctcaaatttaaaatcataatcagaatcacaagcaaaacagcaatgagcaaatgatacgggtgcagggccggaaatgccgatgtaatcgcgtcagttccggcagaaatgcttaccgccaccgtcagaatataatcaacaagcaatgagccgcccgcaatcaggccgggcttctcaccaagattctctttagaaaccatataagcgcctccgccttgcggataagcgtaaataatctgtctgtaggacagaatcaaagcaagcagcaaaatgagaacaccggctgcgatcggaatggaataccaaaacgcggccgcgcttaccgcagccaaaatgatcagaatctgttccgttccgtaagcaactgatgacagcgcgtctgaagaaagcatggcgagcgccttgagtttcgtgagtttctgctctccggccgcctgtgatttcagcggtttcccaatcaaaaatcttttgattgaatggtacatttgttgttttcccctttttttcattttccgtttgatttacaaacccttactgctatgatgtctccgaatgctgattgcatgccatatttcagcacagcaaaaagacacagaggcaaacggatgcccctgcgccataatcgtgcacaggtttcattcatctcctctcatgaacgcttacgaggttagctgtcggattcgggctgatgagagttggccctacctgaaaaaggattcaccccaagcggcatcacgcgccgcaaattggttcccccgctctgattacagattaagcgatatagattataaaagagatcatactcccgtcccgttcagttgtaaaggggcttttatgctgtttcaaaaataaaaaaatcaccgccaaaaatggaaatcaaaatacaaaaaaaagaggcctgtgaacggcctctttttccatcattactcttcgcttttttcatgatccgctttcctttttttccttcttgccgtcagccagatcagaccggccgcaatgatcataagcgccgcgaaaacagcaatatacgtaacgttcagtggtgcggaccggctcttcgtatcagccgccggactgctgtcatcggacttgatttgctgatgattcgaaaacagctgccggccggctgtttcgttaatgacggttgcggcatcgcttgtgctgtctaaaaagctgatcagctcttttgtgacagacgcgccgcttcctgataacggagcaaaaacagcgatgctccggccggagtcccaaggtgattcctgggtaaacgcgacttgtttcgtcgtctcattcagcatctgaaacgaagaaacatcgtacgcgccgctgcggtctgacggcacgagaagcttagaggcgtttgatttcaaaagcggaatttgcggcaggcctccgataaacacaacattccggcctttggcatccgcttccttcatgtctgatgccgtctttacggtaaagccgtttccgaatgaatccgccaccagagaaagttctttcaatgtctgtatgtttacgccatccgggatgacgatcactgttttctctttcccgccgcccgcaaacgggagcggccattgcccgaaatccgctttctgcgccgcatcgcttaccggatacgtcagcgtgctgcttttatcaatatagacccatttgttttcgtcacggtcgatacacggattgttatgtttcaaacctgatgtgacaaattgcagatcaatgtacctgctgcttcgcaaaagcttcggatcaatcgggatggagacgtggtaaaagccgtctttatctttattgccgagatcatcaagacgcaccgcattcggctgtccgttgaccatgacgttcagctccgctctctcagcgtcatcatctgaatccgccttcgtccggatcgattccgacgtttttaatgtaagtgaaagcttgaccttaccgtctttatcaacagcggcagccgcagggtaaaagaagtgctctgacgccgttttgtttgatccgatcgttacatttcccgcgccgaagtcctctagtgtcagtttattgcctgtcttttccgcagcaggctgaaggcggccgattgtcaaagtatctccgcccagctgacttgaataagcgctgtctgtgatgacgcggattttatccgccagcgttttgtctgattgcgccgtgacaaacaggacgggctgccgtttgtcccctgatgtcagaacccgttcagcgagaagaagtttgttgtcttccgctttgatgttcccgcgttcgaaaagctcttttattttcccgttccaatgctgatcagcgccgatgacaattgacggattgctgattttgccggcgtcggattcttttacataggataccttcagcctgctgtctgccgttttcagaaatgcttctgctttgactgcggcttcagcttccgccgaggtcggtttgtcaggaaggataatatcggtttcttcacccgtattgcctgattgggcaaacggatacgggaaatggccgagatccgctccctttgacttgcttgcttctgaaagcacaaggcggctgtccggataaatttttatccagttgcctgacgtatcctgcctgacgcagacgccctcttttaatacgccgtaaaatcgtaatgatacattgtgaaagccttgggcggattggcttttgctgagattgagcttcaccgttttccgcttggaactgccgtcaagcttaatggatttgacgggttcatcatcaatggcgatggttaaagaagacggggcaattaataggtttgacgcctcgtaatcaatcagaagcgactgatcggcattcgaagctcccgcaggaatctgataggtcagctctgcactgtctttcgccccgtacagtgtcatcagatcgccagtcagcgcctgctgctcttttgcgccggcgcttgttccgagggcggaaccgtccgttttcagttcccgggccgcggccgcctgcccgttatacatcaatagcaaaaggccagttatcaatatgatcgcttttttcaaaaaggtcacccgcttttattttgattgtatcgctccgttttgtaccacttgacttcctgcttgaacaagcggtgcttgatctctgtgaataatgaccagatgacgagcacgatccaagcctgggagtatgtaaagtacatcagaaatacgataaagaagttttgtttgttcatttctgttttttcaatgcttaaagtaatcatgacctcagtcataaacaggaaaaaggccagtatccacaaaatcatcgccaaaaacccgacagccagatgcaggtcgtaaaaaagattgatgataaaaatcgtgtttgacatgatcacaccgaagaaaaacaaaaaatacgtaaaaaagaaataaaacagatcgaagatgatccgcttgcgtttcagcttgaaaaattgggataaaaacttgagaacaacgtattggttgccgcgcgcccatcttgtccgctgacgccaccacaccttccatgtctcaggctcctgctcccatgtcacagccgccgggaaaaagcggatatgatagccgagattatacacgcggatggtcagctcggtatcctccgccagcgccttatcatcccagccgccgagccgttcgataatgctccgcctgatcgcgaagttcgtccccgggatggtggcgattttgaaccatttccatctgccgccctgcgccatccactgaaagcagatggtttcaatattgataaacttcgtcaggatcgttttggccgcgttgatgacacggaatttcccgacaaccgctcctgctttctcatcattcatcagaccgagaaccaggtagtacaccgccattttttccggcgtgttgtccgcatcatacacgcagatcacgtctccgttcgattccgcgaaccctgagttcagcgccgaagattttccttttccggcgttcgggggctttgtgataaccattttaatgaagtcatactgacgggaaaattcattgacgatgtctcccgtccggtcggaggaattatcattaacgacgatgatctcaagcctgtctttcggataatacaggttcaccatcgccttcagcgtctgcctgatgacgacctcctcattatgcgcgggaatgagcacgctgaccttcgggagctcccccatctttgcgcgccatttcggaatgttccgttcgtaggtcatataatgcctgaatccgccctgcatcagaaacatgtgatagagaagcatcgcccatattaaacttaatgagataaaaaacagaatgttactcaaggctccttctctccttaaagattcgtttttttaatgtggcgcgcaaataaagaacgtagcaggcgaacatgatgataaacaataacaccacgccggagagaatccaaagcgctttttccagaggcgtctgctgatggtgattgaaaaaggccgttatcggatgaatcttgttttccacatgaatggttccgtctccgtccgttttgatcctgacgctgtccgacgttaccgtttgcttcgttttcttcagatcgagccactcgccgccgggaatccgctccatctgattgacgagctcggggaggtatttcatgccgagatacggatggtagaaaccgcccgccgttccgccgccgaaatcaatcatctgcgaaatatgattctccatatctccgagcggattttcctttgagttatcggcataaccgattgtttccgggtacagcgtcatcccgtccagcatagccggctttgagacgaacggaggggcgcccgaggttttccacgtcgtgccgctgagctgcacttgtccgaaaatgctggagaaataagaagatgcgattttgtagccttcttcagacatcgtatagtgcggcgcttcgaatgacagcgggtaaaggccgagctctgtcagatcgtcaatcgcctgctccagcttcgttctcgtgtagatgttttctttttcacggaaaggcttcacatacgcccggtacgctttttcattcggaaaatcctgttccttttcaagcttgaccggagtatcatccgcattttctgacgtaatcggctgatccgctttggcatcccaaaattcaaagccttctcccgtttcgctgtatcggtatgcgtgcgtgtagccgtgaataatgatgctgccgcccatttgctgaagttttttcaggacgctgaccattttcggcttgtccgccaggtatactttttctccgttttccggattgagatagaccggaatgaccgccagaataaacggaatgtgtcttttatgcaggtaagagcccgcttcgtaaagcaatgtttcatctgacatcggactgatgtcttcaagccgcaagtaaaggagggtgccgccctctgattctccgaaagcgctgcgcagcgctttcgccgtcagaaacgaatcatttaacaggctcgtcacaccgaaataatagtcagagcgcgccgttttccacataaaagggcgggtgccgccgtcaccggaccggtatgtataaaggggctttccttttactcccgatacgccgagcacggacattcctttttcaagcggcatgtctgttttttctttcttgctgtaaatgcggtataccgtttctttttctgtcagggacaaacccgcaaattggcggaactgtccggcgttatagccgatgctgataagctgctgcggcatgctgctgatcagagacacgaatgatgcgctgagcttttttttcgtgacgccgtaatagatgacgcgccgattctttttgaggtccgcggctgtgatgtctccgtcgcttttcacggtgacggcggatgagaaatggcccgcggtcagatcaagcattttgacctcagcggtttctttgccgtccgtgcttgtataaataatgagaatgccgtcctttttgtcttttgcttccgccggacggggaacataaaccgccgaaatcatgaagagcgccgagagtaagagacgtatccatttagagttcattcatcatcatctcgttttccagttcatttaaaaattgctcggccgtttgtaaatcctttcggtacgccaagtaacatacacggaaggtgatggagacgtatttaccgttttgcagccggtacgtatccaattcctttttcagcttcgccagaacggccggcatgtgttcttcaggcgtatgggtcagcacgatgccgaaccgttcggcggacggcctgaattttttgtctgtttcccgaacgcttgaccggatttggcggctgataaacgccagcaggcggtcggtctctttttctccgtagagggatttgaattccttgaaataatgcatgtgcagcagcaaaaagacgaaggaattgccgtaacgttccgcccgcttgatttcctcagaaagctccagcttcatccgcagatggttgtcaaagccggtcaccctgtcgacggcgacaaagctcgtaatctcttcacgcagctgtttcactgagcgctcaagccccttcgccaactcgtgaatccttcccgctatgtaagaaaagacgagcagcgcaatcccccaaatgaccagcacctgcagactttcggcaccggcagacgccataaagctcccggtctgaaaccacaggagcagactgccgagaacaaataagacgagtaaggtgatgacgagcgcgtagattgccccgaaccatatgccggctcccgcaacaagcaatgtgatgcaggttatcagaagccctgcggattgctgagacgcatagtaaataaaaaaagacagcagcaccagcataactgctgtgtagctgcacagtttttgtgattcattgaatgatattttcattaaacaatttcctttcagccagaagcggcagcaggttatcgaaagaatgtgtatcgcccccgctcatatagccgccgtaatcaggtttcagcgtgtccagtgtttcaaatgaagtcattctttcataaagcggcttgatgacagccggatcagctttttgttctgctaaaaaaagaacggccagggcgtaaacggacggtgattcgtattgaaccgccggctccttcgtgtctgcgctgtatcgtccgtacagctgtccgcgcgtcttaaattcctttatcatccatttcgacagcacagcggctttgccatctccccgcttcagattcacggcggcatacagctggtcgatgacattcacttcgctgtcatatttgtattcctttgtttcggtattgaacgatttcggcagaaaaccatttttcaagggcgcaagattgagaacatcgaggttccggttttccgtcttctcatcgataatccccttttctctgagcatctgtaaggcgccgggatcgacataggacaacgtcacggtctttgacgcggcatttgaagcggcatcataataatccgtaaaatacccgtcattcgtattgtatttttccagcgctttcccgatctgcaccgctgttttcccgtattcactgtttccccatagggtttcggcctcattcagacagttcatgattctgaaatcatcaattaaggcattggtgccgctcgctttattcccgtcaatcttccacgacacgagcccgtttttcgtcagaaacgaatcggtgagaagctgatattgcgcttgaaactgccgttcatctttcctgttcagcaaaaatgccatccatagtccgagagactctgataaatattccggctcaccggatatgttcgtccggatcatcccccgcccgttcatcaatttatgataaataaaatgctctgcgggctgaagcggcccggacggttcggccgcagcctgtttttcagtgccggcctccgcgcaccccgccgtcagaacgattgaaatcaaaaggatcatcagacgaaaaacgaattgcttcacagtctatcctcctattttataaacccttttttagacccatatcttattttttcacaaagtatttttactatataggaaacgataaaagaatactagcattttttcacattgggaaattttaaatgggagcgccgtctgctcaccttttcccttttcgtctggatcgtattcccattacagtaaaaaacacaacaaaaggcagcatttctttacaaatgctgcctttctctgatctatttatccaggccgagttttttcagctgttctgccagcgcgttgttcatcggctcctctttgttttggcttttcatataagagttgatgtcccgcttggatgcgcgtccggatttatctttcgccttgcgcttttcaaagacggacagtttctcccggtggccgcatacacatgcgaaggtttggccttcgccctggccgcgaagctccattttcttatgacagttcggacagcgggcatttgtttttcttgccagcgttttccggctgccgcactcacgatcctgacatacgagcatcgtgccgcgtttgccgttgactttaagcatcattttgccgcaatcagggcaggcggtgcctgaaatgttgtcatgtctgaaggtttggctgctgtttttgatttccttcaccgttttgcccgcatatgttttcatgtctttaatgaacacggcggatttcagtttgcccgctgcgatggcggagagcttttgctcccactcagcggttaaggccggtgattttaaatcttccggcacgagctgtaagagctgcttcccttttgacgtaataaaaatatctttttcttttttctcgatcaagaaactgttgaacagtttttcaatgatatcagcgcgggtggcgactgttccgagtccgccggtttcacccaatgttttcacaaggttcttctcttctccctgcataaaggcgcttgggttctccatcgcagataacagcgtgccttcattaaagcgcgccggcggtttcgtctgtccgctcgtttctttcagtgatgagacagtgaggcgctgaccctgctgaagatccgggagcgtctggtctttgtcttcctcatgatcgtcgtcatcctcgtacatatcatacacggctttccagccagacgattgaaccgttttcccttttgcggtaaatgtttcgccgccgatatcggctgtgacctttgtttcttcgtattcgaacgccggcattaacacggcgagaaaacgtttggcaatcaggtcgtaaagctttcgttctttgtcgctgaggcttgaaaggatcagcggctcctctgtcggaatgatggcatggtgatccgatactttcgcatcattgacgaatcctttatgcgctttgacgccccgcttcagtatttgattgacgtactgtgcgtacggcttaacttccatgccgtttaaacggtcttttaaagtcggcacgatgtctgcggaaaggaatctggaatccgtccgcgggtaagtgacaagcttatgctgttcatacagcttttgaagcacggacagcgtctcttttgcggagaaaccgaagcgcttatgagcgtcccgctgcaattccgtcaagtcgtaaagaccgggagcgaagcttttcttcgccgtttttttcaattctgaaatgactgccggctttccttggagatcttttaccaaacggccggtcaccgtctgatcgaatgttcttgtctgctttgtttttttatcctgccatgtcagcgtcatctgatcagccgccgcgcggagaccgtaataaggaacgggtttgaacgcctgaatgtccgcttcacgcttggcgatcatcgccagtgtcggagtctggacgcgtccgcatgacagctgtgcgttaaatttcgtcgtcagggcgcgggtcgcgttgatgccgacgatccaatccgcttccgctctggcaacggcggaatgatacaggttttcgtactctttgccgctgcggagcttttgaaatccttctttaatcgccttatccgtcacagaggaaatccacagccgcttaatcggtttgcggacgtttgccttttcgataatccagcgggccacaagctccccttcccgtcctgcgtctgtagcgattacgatctgggtgacgtctttccggacaagctgagctttgaccgcattgaactgttttcctgtttttttaatgacgacgagctttaaaggctccggaataatcggcagatcctcaagccgccatgattgaaattctttgccgtatccttcagggtcagcgagcgttaccagatgcccgagcgcccatgtgacgatgtagcggtcgccttcaagatatccgtttccttttttatgacacttcagaacgcgggccaagtcccggccgactgaaggtttttcagctaatacaactgtttttgacatgcttttcacttctctttctttcacaatcatcctgttattataacagacttcctcacgctccctctaatcgaggacgttttttgtgtcaatttctgagaaaatgacgtgggtcacggtttgggcatacggagaggtgcggttgatgaagtgttcgatcgtttccaggctgtccgcgttcatcttcagcatataacacgccgccccggcgacccgaaaacaaaattcaatgttgggaatggattgaatgtaggttttgaattgatcgtatttcccgtttttcaccgtcgcttcgacaatgcaggagacgggaagcccgatctttttttgatcaatgtccaatgtatagcgcttaatgacgccgaaggattcaagctgtctgacacgctctgtgacggacggggctgacaatttgatttttctgcccagttcccgcatggacaggcggctgtcccgctgcagctctttaatgatgctcagatccacattatctagtttcatgactgtagtccttccttacccttttggctatattatcaagagaaatccgaaaaatgacaagaacaacaggctgaattaataaaggttttttaggaactgacgcgaaatggtcatattaggactgccctttgcttatagtatagaggaaaaaagatgtccgacaggagggagctgtatgttacacacgcctatcggcagacttcgcacgatggggtttattgaaggaatgtcgcttttggtgctgctgtttatcgcgatgccgctgaagtattgggctcatcatccgctcgccgtcaccattgccggttccattcacggcggtttgtttatcatttatctggcggtgctggcgtatgcggcgtttactgtcaaatggcatgtgaaatggtcagccgccggttttatcgcggcctttattccgttcggtaattttatttatgatcgcggcctgagacattatcaataaaaaagctcctcttctgcagaggagcttttttcatgcgttacatccatttcgtcacccaggcgatataataagcgccggggatgaatacgagctgggcgagaagcgtgcccgccacccttgatgtcaccatcgtcaacgatgtccattttaaggagacgtagctgcgcttgcccttcgccacatcgtctgccagtacggatactttcgggtcaacaaacacagccaacagcatagtcgcaactccgttgattaagcctgatgccatcacggcggtcgtgctgtgctcaggcgccagaaggccggcgtacagagcggacagaacaccgatcgtgtaaatagacgtaatgaccatattaatgacaaacaagcgtttcggaatcattcggaattgaagcccctttaaataggagactgacggcagtctgatataagaacgcgcatgcttcagcccgttcagtgaaaatcctttcttaaatacctgcatgacggagcctcctccgtccgccaagtgtataatcgccctggagaataacgcgacgaatgtcggcaaaagacagatgccgagcatcgttccgaccgtggagccgaatattaaaaatcgaaactgagcatccacaacagacagggcgtttgatccggcggcatcaatcagatgtccggtaaacggctgctgaaccatgtttgacatgcgcgacacgatgaccatgacattaaataatgacagcgcggacgcgataaatccgactctcgcgccggaaagccgtgttgcataggcaagcgtttcaatcgaatgtatcagcagcagaaaacagaagataaacagtacttgtgaagtaataacgtgcaatgtatgattcctccaaatcttttctactgattagactctgcagactgcggcgaggtttcggccggttacataaaaaaaccgcccggatgtccggagcggttttgtcttattcttttcttacgcaaataaataatatatggttgcccgccttagcccgcgggtgattcgtgtattaacagttccgacagaatcattcttcgaaagtaaacaccatggaagttcttgaacacaagacaacgaaagccctacctctcaatcgtcactgcggctccgaagccgcgccggtgtgaattgtaaaacaaaaagtcttttttccatctcttcgttaggggcgaatatcagaaggaaaagaataagctcagctttttttcaagctgtccgttgaagcctgaagcttctatatcaaaacagaaaaaagaagtttactttcttttttatttgcatgttgtcacttagcagttaagtataacagattgcccctgaataatcaaatgatttattaaagttccagctcggccggcgttttttcacccgcgttcatgagcttgatctgcttcggttcaatttcaagaatcaccaggttcggatcgtcttttccgtcaaaccagcgttccagtttcggatcccacagcttttcttttaaatcggctgagttgttcagtttggcggttccggccacttccacataagcgtcaccgaatccttcacagtcataccctaacagaatatgaacattcggattgttttcaatttcttccgctttatgagtgtctttgctcgtcggcgtgtaaatcgttaagccgtcatggaaaaatgtcatgtagcgtgaatgcggtttgccttgctctaccgtcgcaagcgaaccgactttatgatgatccagtacttcaagcactttttctttgatttcattttgattcatgaagaatcactcctttttaacgtctccgcttttacttttccacattggggagacatttaaaccaagaaatgtgctcttctgccgatcttcgctccattcccgcttcagcatgctgtagttcaccgtgtcatgataggcgccctgtacgaaaatgccttctctcgtcagtccttctttctgaaatccgagccgttccgccaccgccctgcttttcgtgtttttttcagccgcgctgatcataatacggttcaggccgagatcctgaaatgcatgggtgatgaccgcccggcagcttgcggtgataatgccgaacccttcatgctctcgatccagccagtagccgatctctgctttttgattggctgtatcgacattatggatgctgatcatgccgcaaaaccggcccttcacaaaaattccggcgtcaaacccattttcttccgcgtatttatagcgccattcggggatgatcacatcgcggtacgtatcgatatcagccagttcttccgcccagctgagccattcgctgagatggttttgatttcgcttcataacagaatacaattcgtccgtatcttctttggcaagcaatctgatcgtcagatgttcccggatttgacaggaaaacacgatcacaccttctttcctttattagccattatacaggtaaattcatttttttccatacaaaaaaagatgaggcgtgcagcctcatccttaaatgcgcgggtcggtgaaaacatcgtgatcatccgtgcttgtcgatgacatttccgtgacgaccgccccttcttctcccgcttgaaaccaatgcttcgtatccggcggtatggtgtattgtccgcccggctcaagcacaatctcatgccagacggtgtagtattccttgtcttcttccggcgggaggacgcttgggttctctgtcttttcgccttccacgtagagatacaccttcccccagcggcagcggaatgtctcttgttttcccttctcgccgccgaccggcggatggcggtgttccggacacgtctggcgcggaaagagcaccaattctttcgaacagtagcggtcggtattcacgtaaataaacagctgaagcccggtttccttaagcttacctaaaccgtaatccataatttgaatgtcttcgacttcatcatcagtcagaacgattcccgcattttgatagtatgcattcacgtcatgtttcgatatcgtcatgcttcagcccccttatgtgtttacaaatccgccgccgttgacatgcagcgtctgcccggtcatataagatgattcatctgaggccaagagcacatagcagccgacatgttcaacaggctggcctgcccggcccatcggtgtagtctgaccgaaggaagcgactgtttcttctgagaatgtcgccggaataagcggtgtccagatcggccccggcgccacggcgttgacacggataccgtcgttgacgagcgcttgcgccatggatctcgtaaaaccgttaatcgcgcctttcgtagccgtgtagtcaatcagctgcggattgcctgtgtaaggattaatggatgtcgtattgatgatcgcgctgcccggcttcatgtaatcaatcgcttttttagtcaaataaaattgtgagtaaaagtttgttttaaaggttctgtgaagctgatcgcttgtgatgtctttaatgctttctttcggatgctgttccgcggcgttattcacgagaatatcaagacgcccgaattcttcaaccgttttttcaaccgcttcattgcaaaagtcttcctcaccgacatcgccggggattaacagacattttacgccttcttcttccactcgtttttttgtatcttccgcatcaccgtgttcatcaaaatagacgatcgcgacatttgcgccttccttcgcgtaagcaaccgctacggcgcgtcctataccgctgtcgccccctgtgataagtgcggttttcccttttaatttatcagcgcctttatattctttgtattcataaacaggcgccggattcatttcgctttcaatgcccggctggcggttttgtgattccgccgggaattccttcggatagttttccatgttaagttcctccttcttgttcgatctcatatttcttgtctacctcgtcagtcttccggataaacatgattgagacagttcagaatgttttcggagaaaaatgtttcacatggaacgcaagaaaaaaacccggctggcagccgggtttttgttttcaattatgaacggaccgcttgtttgcggagcacgtcttttctcacttttccaaggttgtttttcggaagttcgctgacgaactcaatttccggaattttaaaggcggcaagacgttcttgaaggaatcgggtcacttcttcttctgtcaggccttctctgccgtttgtcacgatgaacgctttcggcttttcaccgtaaagcggatcagggataccgacaaccgccgtttcaagaatgcccggcacttgctgaatgacctcttcaatctggtcgggataaatattgtcgccgccgtagatgatgacatctttgtaacgtccggtgataaagataaatccgccttcatccacatagccggaatcgccggtatggaaccagccgtctttcagcacttttcgtgtcgcttcttcgttaccttcgtagcctttgaataaaaacggacttttcacaacgacttctccgattgagccttgcggaaggaattcacctgtttccggatctacaacgcggacgtccacttcttccatcggtttacccgcggaagcggctttatccattcccatttgcggattccaagagctgataccccacgcttccgtgcttccgtatccgtgcatgagcggaatgccgatatcgagatactgctggatcaggctgcttggcacctttgtgcctcccgtcatcatataaacgatagaagacatgtcagtctgatgcgtttcccatgctttcagcaggtatgtgaaatagactggcagcgccatgatggtttgaattttttctttttcgatgagcttcaggttttccacagggtcctgattgtctgtcataatgaatgtcgttccgctcatcgtgccgaccatctggcagataatcgcgctcgtatggtaattcggatggcatgctaagaagcggacatgctgcattctccccgtgtatgccaatgtcgcgttgacgtagttgtatataccgccgtgagtgatcatgcagcgtttcggattgccggttgtacctgaggtaaacatcagcaatgccgtatcgttttcagacaccgtttcgacatccggtgtatcaccggagcctgtcaataaagcgtcaaactgaggcgttgtctccgcagctgttccggtctcgaccttcagtttaagagaagataccagcgcaggaagcacttcttccatgatctctttaaattcagtgccgtaaaaaacagctttcggttcacaggctgctaaaatgcctttcatttcgtaaggtgttaattgccagctgaccggcacaaccaccgcgccgatttcgagtgccgcaaacatgacaatggatgccgcgtggccgtttttgcaaagcatcgccactctgtcgcctttttttattcctttatcaagaagcgcttgtgcaagctggttgattcgttttcgatattccgcgtaggtcagggtatacgcaccgctttttacagcttcgatctcttcgctatttgaaatgtcatgcagaatcagatgctgtaatgtctccatattttcatctcccataatgataaatcaaaaaaaactctgtcagattttctttctcacgcaacccattttaaaccaaaaaatataacttgtaaaactattttgttttagaactattccatcagtgaatgatacaatagtcccgtgtttttagtttcttcccttccccttaccctcatacatgcacaaaaaaacacaccccacatgaggtgtgcgcttcctgtttaccgctgtcctttctcctgaatgaaatgataaaacagcttgtttaaacgtttgtataaatcggcctcatcctccgtctggaaggcttttatactgtcttcagactcgataatggccgagctgaccgcacttagtatttccgacccttcagcgggcatatcagccggcgccatcatcaccaaagcgcggtcgacggtcagggaatttccgtccatgcctttgacactgcatggagctgtcaaatcataaattttgaaaaaaggcgtgacaatttcttcatttttgagatggtacagggccatcgccgttcccggaatgccgagtccgccctgtcgttcacgctcagcaaggcgctgtgcggttttttgggcattatgaaccaatccttcttgctccagcatgtcaaacatacggttcaaaaacagctcatacgccgtgtttgaatcaatggatttgatcgaaaagttccgcagcacgctttggataaccgccgcgtaatgcgccatacggccggccgcttccagcatatcaggcgtctccggctgcttctcctctctttcaccgtttctttttttgtcaagaatcagcggaatttttcttttgatgtactgcttgacctgatcagcgtcttcttcgtttaaaagcggactgaccatgacgtaatcaatgttttcatacgggatcggaacggtggatacgatcatgtcatacgcggtgatgtctcgatccttcagttcgatgagggaagacatatcaaaggaacggatttccgaaagctcttttttcagcctggatgcgagcattttggacgacccgatgccgcttgaacagacgatcagcgctttgatcttcgcttcttcccgtttgatttccaaagcagagccgaagtgaagaacgatgaaagcgatctcattatcagagaaaagaagccccggaaagaatttttccattccttcttctacggccatgtacagcaggaagtagtcgcgtttaatttgctcggtcatcgggttgtacatgtcgatattttcttttacccggttgatcgcaggctccagatgggcgattaaaccgtcgtataaagaaccgttttccgtcagatcaattttaattttttcagaaatgaagccgatcagctgcttcgtttgcaaggccgtttcaacctctatgtcttccggtttgaattccgttttgtatttgcggttggcgctccgcaaatgaatggtgatatatccgatctcagcttccggaattgaaacgccgaacgctttttcaagctcttttgccatttccagcgcagagccgtactccttcgtctgctgcagcgcttttagttccgaagcctccatcgtgatggtttctccgagcctgatccggtccatcgcaaaggttaaatgaaccgcaagcgccatgtatgagctgtcagataaggcgatcgcgattttttccttgagctgaattaagagccggtccattttcaaaagttccgctttatttacgacgccgaacattttttcagcatcgtccggttttcctttaatattcaattcaaccgcttccaaaaagctttgaatatcaaggcggttgacgatgagattgccgacgattttccgtttcgcattttccggccccgtcagctgaatgccgaagcccctttttcggatcagcgtcaagccgaagggcgcaatccaagtctccagctcatccaggtcatagctgatcgtcgcgtttgtcacttgcagttcgttcgccagactgtagagcttgatcggctcttgagactctaatagtgaacatagaattaaaagtttccgctcctcagcgctgtattcatgctgttcataggacaggtctgacaggagtttttgtttgtcctccgggtttccaaccgctttcagtcctttgccgggctgcttatcaagtgccagaccgaatgattccattatcggtttgattgtttttaactcgcggtgaacggttcttgtgctgacttgtaaagcttccgccagttcatgcactgtctcgtaccggttctgcagtaatagatgtttcattaatttttgttctctcgctgtcatatacatgaaacgcgcctccagattttctagttgtgagaagtatggcatatggggagtgctgccggggaaagtggtgtaagttataatataaaacgctttcaatgattattcaaccattttcaaatggcaatttggcactgggccgtgtgacagtattgaaaaagaaaaatgtgtcagataatatgccatgacgcttgttactcttgatccgcacggctatacttcaaagtgaccttacttgtttttagacattgcacaccacataaacaaacgcccggaagatagcttccgggcgtttgttctgtttatggaatatcgcagccttggacaccggtataaatccggaaccactgatcatggctgagtttgtacgcggatgcacgcaccgcggcggaaatgcggttctcttttccgctgccgacaatcggcatgatgtctgccgggtgggtgaacagccatgcgtacatgacttcgtcaatggaagcggcgccgatttcttcctgtacggaacgaagcgcggcacggatacggacgtccttatctgattgtccggtaaagacgctcccgcccgcaagcggtgaccacgccatcggcggaatgcgtttttcctgacagaaatccagcgtgccgtcatgaatattttccagctcgtacgccgagatttcaatttgatttgtgatgagcggatcatccaaataggattcgagcattctgtactggtgcgctttaaagttcgatactccgaaatatctgacctttcccgagcttttcagcgcatgaaacgcttcagccaccgcctccggttccataagcgggtccggtctgtgaatgagcagcacatccagataatccgtattcagattcaagagcgactgctccgccgacgctaaaatgtgagacttcgacgtattataatgatgcgacttgtttccgggccgttccggtgattcaatgacaatcccgcattttgtgacgatttcgattcgctcccttattgaaggcgaaagggacaaagcgccgccgaacagcttttcacacgtataaccgccgtatatatcggcatggtcgaaggtggtgatgccttggctgatacaccattcaatcaaattcagcagctctccgtctgaaacattccattcgttcagacgccaaagcccgtgtatcactcttgaaaattccaggtcttcagccaattgaatgcgctgcatgtgaaatccccctttttcttagagcctcttgtatctctgttttcaggaattgcccatgctgtttcattctgcttcggcggccgattttcctttcagcccgcgaaaatcgtcatttaatgattctgaaactgctttttcgctttttcaacgacgtaatggcttccgccgcgttttttgacgtcttgaatcatcatcgcgatcaagaggtctttctttttataatcgtaaccgacaaaccagccgttttctttgccgtctttatcttctttagacgttttcagctcggctgtaccggtttttccggctacggtaatgccgcttacggccggctgatatgcagagccgcgcggatcttcaacgacgcctctcagcccttttgtgatttcttcggcattggctttcgataccacttgcttatgccagatttgcggtgttttttctccgtctttgatcaatgtcggtttgacgagatttccgtctgttacaaatgcggtatagtcagccgctaagtgcagcggagacatcagcatctgcccctggccgtagcccgtatctccgagaaggatctcggaatcaagcttgccgttagcgattgaagacttttcaatcggaaattggtacggaatctcttcatcaaacccaaatgtttttaatccttttgtaaacgcgtccgctccggcatctatggcattttgcgcaaagtagatgttgtccgatgtgatcagcgcgttttcgagatccacttcattcaggcgctctgatacgcgtgtgacatggtaaccgccccagcttgaatctttctgccactcttttccggtgatttttttcttttctgacgctttcaatgttccgtttgtcaggccgactgccgcggcaatcggtttaatcgttgaacccggcgcataaagtttgttgaatttcgctgaaaacggattgtttttatcttcattcagctttttccattcttttccgccccagccgaaaataaagccgttcgggtcataagatggtgcgctgacgagcgcgagtgtctctcccgtttgcggttcgagggcgactgccgctccgctgtcatctttcatagaatcatacagcttcgtctgcgtactcatgtcaatcgttacatgaatatcctgcccgctttcggctttcttttcagcaatgacctcacctgtttgcgggacgtaaattttccagccggtcgtgccgcgcagcttgtcttcatatacattctcaaggccggcgatgccgattttggaagtatcgctgtattgcccgtctttcgcttttttcagctgctccgctgtgatggttttaatatagccggtcagatgggccgctttttcgccgtacggatagtagcgggagctgactttcgttttcgtcacgccgtctaatgcgagcaggcttttgaccttgctttcatcatccggtctgattttttgaatcgggacataagagtcgtcttttacccagccctggttcagtttgcttttgatatcgtcttcagaaaggtccagtttttcagacagttttttgatcacgctgtctttatccttgccgagttttccagggataatgccgatttccggcacctcggtatttacggcgagaccttttccgtctttgtcgtaaatttgtccgcgcttcggttcttcatttgcgatctgcacggttttgtcatcggaaagctgtttgaaaataaaagaaggattccagtcgatgttccatgattctccatcgtctgttttttcttttttcaggacggccgtgttttcaaaagcgaccttccctgcttttgtatccatgctgactttataatcgatgtgctggaggtcatcttttttcttgtcgtcttcgtcctgtttttcggcagtgactttcagatttttgacccctgcttgttcataaacggtttcatatcgctttacaaaatcctttttggatcgttttttcttttcatcctgggtgaggctttggtacatcttatcgtagtgaccgccgttccagtcttttacgaaatctttcattctgtcttcggccgattccgttttcgagcagccgatcaaacctatgattcctgcgagtaaaagtaataggtataacccttttttcactgtctattcccctgccttccaactgttattttctcctaaaccaaatcaggctggcaaggatttttttctcatattgtttaaaatttttttgtttttcctgccgtcacgggccatattcttatacaatgtatctattaaaaaaagggggaatttcagatgatcaaagaagcagccatgctgtatgtaaaagaaggtcttgagggggaattcgaagaggcattccgccgggcggagccgattatcgcgggcatgaaaggttatctgtcccattccttgtccaaatgtatggaaaagacgcataaatatttgctgcttgtggaatgggagacattggaagatcatacaaaaggctttcgcggatcgccggaatatcaggaatggaaagccttactgcaccgtttttattcaccatttcccgttgtggagcattttcaggatctatcagcctcagatcgcgtgaagcgtaaaaccgattaaggagatcgaccatacaaaaacggcggtatagatattgaatttcccggagccctcgttttctttccgtttttcctccagcccctgaatgaacatgaccgcaccgagaaacacgagcataaccggctgtatgacagaggtatgttccgcatacgtaaatgcggcggccgcaagtataataatcagcatcgcgagtgacagttttaaggcgcgcagcaaagcaatccatcctttctgttatcattttttgaacacaattctatttctgtctttatcccccattattctagcgtattttttgcgcggatagaacgaaagtcggacaattttaagtttgttttaaggagcacgaaaagcgcgctcccgatgaaaaggagcgcgcggttatgagccggcgaggcttccgtatccgagcccccgcaggacgcatgccatgacttcatatcccttgctgttggggtgtacgcggtcatgagagagatattcattcatttttcctttgaaagcgctgtggacgtcggcgattttgacgtacggcgccgatgcgagtgtgctgaggtgcgcattataagaggatatccatttttctgcaatggagattcccgggaaaggattgtataaattgaagacgcggatctcataaggagacgggtgcggcccttttaaggcggcgatcttggcaatcatcttttcaaagttctcatggcagtgaccggacacgccggtgaacaccgaagcgtccgatgtttgctgatatgcctgaaccgaatcgatcaaatcgttgccgcagcctgtaatcgtaatcatatcagcagcctgaatccgcctctgaatgtacggcaaggacataagcccgagaatttctcccgtctcaaggcctgatttggcaaagatggatacgtcggttcttgtctgtaaatcttctgccatcatacgcccgaaccgctggacaaaaccggcggaaaacggcccggatcccctccccgtcgtcaaagaatcccccagcgccgtataaacaagtcccatttactttcctccactcgttactatcgatattgtaatgtacgcgagtgaagaaaaattggctcggtcaataacccaatttctcagaaatatgctgtgcagcggttttgaccttttcggttaaatacggcagcctgtcctctgaaaaccgggcttcgaagccggcgatgctgattccggcagccaccttaccttcatgattgaaaatcggcgccccgatcgccgccgtgtaatcttctaattccgaatagctgatcgtataacctgattgtaaggacctttcaatggattgaagcagttcagcctgatccgtcatcgtgcctgaggcgattgcggcaagctttgtcttctgaatgtatgtgtcaatctcctcttttggcagaaacgatagaatgcttctggcgcacgctcccgcgtacagcggcgaccggcggccgattgccgtatacaggcggacggtttgagtgccttcaattttttcgacgtaaatggcttcatctccgtccctcatgatcagctgaacggcctcatccacttcgccgcacagctcttccataatcggtttggctattttcctgatgtccagacgttcagagacgagctggccgaattgtaaaaagatcagaccaagctgataacggccgtccgctgcccgggtgagaaatcccgtttcctccagcgagcttgccatccggtgaaccgaggtcttcggcatctccgatagagaaaccagttgatttaagctcaggctcggttcagtcagaaacaagtgaagcagttccattgatttgatgacggttttgtttttgttttccatggtctttagcccctttgtcagatcagccattccattttgagccttgctttcagctccttcagctgctgttccttctctaaaagcagcatttccgcttcctccagcgaaacggcccggaacgtgatatgttcccccggcatcgtttgggcgacgagaggaagatcagcggatatgatatgcgccatccgcggatagccccccgtcgtctgtctgtcagccagcagaataatcggattgccgtccggcggcacctgcaccgttccgaacgtcacggcctcagataccatctccagcggctcccgcaattcaagcggagcgcccttcagccggtagcccattcggtcggattgaggcgtgaccatatatgactcgtgataaaaacgcaattttgcttcttctgtaaaagcgtgaaattgagcgccttcaagcactcgtatgaccggattttttttcagcggcagaaatcctctgctgctgacagaccaatcaggcgctgagaaaccatgctgtccgaaagaatcgctcagacggtacgcgattgattccgaacatggcgtcatacggccgagcggcagctcatcatctttttgcagcgctcttccgcaaaagccgccgatccccgctctgacatacgtgcttttgctttccatgacggcgggcacgtcaaatccccccgcgacggcgagataagcgcggctccccatcttgcatggcccgaatgagacgacgctgttttcctttatcaaaaccggtttccacagaggggcgggctccccattaatatgaaaggcgaaatcagctcccgtgacggcaataaccgcaggttctgaaaattcaaaggaaggcccgggccccatgagcgtaatttccagtcccgcctctttttcttgatttccggcaagaagattggcgatgcgcagtgagatcgtatccattgcgccgcttcccagcacaccgtatttctgataccccgtccgccccgtgtcctgaaccgtcgtcaagagaccgggctttaccactttcatactcattcggctccctccttgatgcggctgtactcctctgccgtgatccggacgaatttcaccgtatcgcccgctctcaatagactcggcggatgttcttccggcctgaaaagccggagcggggtgctgccgatcagctgccagccgccgggagtggatatcggatacacaccggtctgcattcccgcgattcctactgaaccggccgggatggacggccttggcgacgcctttctcggcgctctgatccgctcagacattcctcctaaaaacggaaatcccggcgcaaatccgagcatataaacgagatattcgccttcagtatgaatgcggatgacgtcttccggggtcagatcgttcatctcagcgacctcttctaaatcgggaccgaaatcaccgccgtagcaaacggggatttccatcacccggcgctcttctttgcggccggtcattatatggctgagacgttctgtcacttctttcttgaccagggcaaaaggagagacgcctttttttatgtttgagacggcatacacatcataaaagatcgttaagcttgtgaatgccggaatacattcaacgaagcccggaaacggccgttcttccatacaggctgccgccgcatgcacccggccgttgacctcttcgctgatgtgcccgccaaagcggatgataacggcggaatcaccgtacggctgtatatcaagcgctgtatttccgctatactgcatcattgtcatcacctcgttgtattctttctcacttacaggacagcaagcgattcatttcgtatatcggtgatcagcatgtgccccggtgaatgtgttattacgatgtcaggctttgcttccatgatcaccgcctggggcgtaacgccgcaagcccagaatacgggaacttcgccttcccgcaccgttacggcatctccgaaatccggctgatgcaaatcgctgataccgatgctttgcggatttccgatgcggacgggggcgccgtgcacggcgggaaaacgtgacgtgacctgcgccgcgcggactgcaagcctttccggaatcggtctcatgctgacgaccatctttccagaaaacgggccggcgggaacacagtcaatgtctgttttatacatggggacattcacaccctcatcgatgtgcctgattggaatgtgctgattaataagggcttgctcgaatgaaaaactgcagccgattaaaaacccgacatcatcatccttccaatacggcgtaatatccgttacctcttcagtaagcacgccatgccgataaatcctgtatttcggaaagtccgtccggatatcagctcccggcgcagctattgccggaacgggtgaacccgcatccgtcacatcaagcaccggacaaggcttttgattgcgctggcagaataagagaaaatcaaaggcaagatccttttgcaaaacgacgagattggcttgtgcgtaagaagcggccatccccgccgtcggcccgatcatctgccccttcctgatcagctgtctgacttcttcgggactcatgtcactcatatgttttttcatatcatcagctccatagctgcggcatctgcgtgaataatgtatagatgcccataaccgccatgacaaccactacgatcgcccctgcaatcgtgagccagatcggatgcttgtaatcgccgacgatttttttcttataagcgcccaacagaatcatcgctaatgcaagcggcagaattaagccgttaagcgaaccgacagcgaccagaattttggcaggctggccgatcgtaacaaaaataagagtggatacgatgataaaaccgataatgacgccatgtgagtgcttttcgatttttgttgaaaacgatttgaaaaatgacaccgatgtataggcggcgccgatgacagacgtgatagcggcagaccacatgatgacgccgaaaattttatagcctacatttcccgccgcaagccggaatacagaagccgccggattttcaggatcaatgctcaggccctttgagacgacgccgagcacggcgagaaacagggcaatccgcataatcgatgtaatcagaacgcctgtgatggagcttctcgtaacctgagggaggacttccttcccttggatgcctgaatcaagcaaacggtggccgccggcaaatgtaatgtatccgccgaccgtgccgccgacaagcgtcacgatcgccagcacactgatatgatcaggcataaaagttttcacaacggcgtgtccgaccggcggagccgtcgttacggcaacatacactgtcaatacgatcatgacgattccggcgatctgcataaaacggtccatgacttttccggcttcctttatgacaaaaatcagcaccgcgaccgctgcgctgattaaagcgccgatctccggtttgattccgaataatacttgaagaccgagacccgcgccgccgatgtttccgatattaaacgcaagtccgccgagcacgaccagaaaagcaatggcataaccggcgcccggaagcaccatattggcaatctcttggccgcgctttccggaaaccgcgataatccgccatacattggtttgcgcgaaaatgtccaaaataatagaaattaaaatgataaagccgaagcttgccgccaatgtattggtaaacgtggccgtttgcgtcagaaagccgggcccgattgatgatgtcgccatcaaaaatgtcgcgcctaaaagaagcgaccatttgccggaagcctttccggctgtttttttcttttgctccatgctgtcttcctccctctgctgctcagtcttttgaaagcgcgctgatttgaatgtctgccgcttttaattcttttttgattgtttttgcgaatgtgagggcgtgggctccgtctccgtgaatgcagaccgtgtccgctttcaggcttacagcttgtcccttacgtgatgtcaccgtgctgtctttcaccatttgaatcacttgaccgaccgcttttttgtcatcctgaatcagcgcatccggctctgaacgcggcgtcagcgtgccgtcttcctgataggtgcggtccgcaaacacttcgcttgccgtcctcagtccgattcgatctcccgctttaatcagctcgcttccggaaagcccgaaaagaataagcccgggatcaaaatgacagaccgcctgagcgatggcttctgacaggccgggattgacggcggccatattatataaagcgccgtgcggcttcacatgctgcatctcgacaccttctgcttttaaaaaccctgacagcgcgccgatttggtacagcgtcagatcatacgcttcctcgggtgtaatcgcgatctgccgccgcccgaatccctgcagatcgaacagcccgggatgagcgccgattttcacgcctttttccgccgcaagcgcaaccgttttgcgcatcacgctgggatcacccgcatgaaagccgcaggcgatgtttgcagatgtcacataatccaaaatctcttcatccagcccgattttataagcaccgaaactctctcctaaatcacaattgatgtcaatctgaaacataagatccctcctgtattgtaaacgttttatatgattatcattccgctattcggaatgactattccgaattgttggatttctcttcattatatttatttctgacaggtttgaacatccttttgtcagaaaacctaccatggacctagtcacaaatctgacaaaacaaaaaaaaagagagtctcatactgagactctctcttttttctattataacacccagtggcggatcgctttggcgaccccgttttccgtgttgacatcagtcacccagtcagctgtttctttcacaatgtcctgcgcattccccatggcgacgccgacacccgctttttcaatcatggcaatgtcattcagactgtcacccatggccatcacattttccatcgtgaagccgagtttttccgataccttcgccagcgcagccgctttgttgataccgagggcattgacttcgatgttgatcggactggagtttgtgatctcgagctccttgtattccttgagctctttcagcacctcattccgcacttcgtcatcctcgatttcgaacccgaacttgagccactgatgatccgtaatcgtttccgggaattcccctctccacactctatcgacggtagaggcccagaaattcgtgttgtgcttattccttagatcccataatttttgaatatgatcggtatgaagaagcttgcgctcaaccagctcaaagtcggaatcccagatttcgctgccgtttgccgtgattaaaaaggatgacagctcgagagactcagccagttcgcggcaggtcatcagcgtgcgtcctgtgctgatgacgacgtgaattcctttcgcctccgcttccttgatcgcccgccggttttcctccgggatgagctgctcgtcattgagcagggttccgtccatatcaatcgcgatcagtttaatatctgcgtcttctctttgtatcggcatatatgtacctcactttttataatgtagtcgtctctattttaatacatatgacccacaggaacaaaaaaccgtttcatgcgtttggcggggagaacgttgaggaaaagaaatattgaggtgatggaggatgaaagaaagaaaacaaaagaacaaaccgaatgaaaatcctgaacatcatgatttaaccgatccgattccgctggaagagctgaaggaaaacgccaatgacgaaaaacacaaacatgaccaaagggacaattcacaaagtgaaagagattatgatacaaaataacaggcttgtccgaaagccgccgctggaggcggctttttttacgatggctggatatatatgctgagctcagcttccgccacaggcttcccggcaacagacgctttcgcccggccgaacacaaaaccgcgtctgattcgcgtgacctcaaaaaaaagatccagacggtctcccggcaaagcggcacctaacctttccgctttcttcaccgcggataagagaccgaggccgtcaccgccggtaattcccgcgcaagccgccgtttgggccattgcttcaacgacgagcgaaaatggcatctctctttgggattcagttataaaccagtcattttcactgatgtttttgtaagcagccgcccattttccggcttcactgttcgtcgtgccgtcaatcaaaagaaacggaaaacgatggggcaatagcttctgattcatcacgcagcctcccttctctctcattataacgcaagaaaaaacccgcgtcccccgacgcgggttcatttttattgattgagctttttgagcacgatgccgtgcagcggttcatgcggctgaataccgcaaatgtcttgaagaacgccgctcgtgcctttttccgcgataagcttttgcagctcaaccgcttccggatcatcctgatagtcaaagcgcagggcggcggcgatgccttctgccagcgcgttcggttcttttatttttttggccggccctactaatctgtcattcgctccgagttttctgagcggtgatctggcgactcttgtcacatcatccgtgatgtattcattttcaaagcggccgatgattttcttcatgtactgctcgtgttcggcttgcttaaagccgtacgctttcactaagtactcgcccgtttctgaaagtgcatcgtacacgacacgccggatttccggatggccgatggcctctttgacggtttttaatccgcgctgatagccgacgtacgccgtaacggcatgaccggtattgacggtaaacagctttctctcgatgaaaggcgtaagatcatccgtaaacaacgcaccttccagtaccggctggccgccggcaaagccggttctgtctatgacccattcaaaaaacggttctacggatactttcagcggatcttcatggtgctgaatcggcacgatccgatccaccgcagaatccgggaagccgaccgtccggttcacgagttcccgttccgcttccgtcaaatgtccgaaaacttcttttttcagaaaactgctgccgccgatcatattttcacaggcaatgatattgagaggttcagaggacgttctgcgcttcagcccttccgcgatggacggggcgatgagtctgagaacgttcgggcccaccgccgtcgtaatgatcgccgcttcattgatcagcctgtacagctcttgttcttgcaccgcgctgttgatggctgaaacggggccgatgatttcggtctgccggccgccgtcggcaagctccacggtatattccttcttttcattgagaaggctgaccattgtttcattcacatcagcgaaaactacctcatagccggaatgatggagcagggcgccgataaagccccgcccgatgtttcccgctccgaaatgaagggcaatcatgtcagttcacctcgctgaaaatagcggccagttcttcttccgtctttgcactgatcagccgctcgatgttttcttcctctgagcagatgatggcgatgtttgacagaatgtctaagtgttcattgttttttccggcaataccgaaaacgacctttgccgtattgccttcaccgtattccaccccgtccggaatctggatgacggaaatgcctgaatgaagcacctcatccttcgcatcttccgtgccgtgcgggatcgcaatgaaattccccatgaaagtggatgatgtttcttcacgttcgaacattttttccacatagccgtttttcacgtaaccgttatcaatcaacgtctgtcccgccaggcggatggcatcctcttttgaattcactgtctggttcagtttgatgttcgctttagccaatacttccatgatgaagatccctctttctgtttgattagtttttaagcttttcaatcagttcatcgtatttcgggctgttcaagaaattatcaaccgaaatgtgcaccgcctgcggcagcttcgctttcgcacggtcagtcaggtccttatgcgtaatgacgatatccgcgtcattcggaagattattgattgatgtatttgtcacatcaatgtcaagttctgcttttttcactttgtttcttaaaatggaggcgcccattgcgctcgatcccattcctgcatcacacgcgaagataatgcggcttacttggtcagctgaaatatcagcggcgttttcctgttcttcctctttgtccgccaatgcggctgccgcttcgcttttcctgcctttcatttcctgcattttttccgcagcggctgtcagatcttcttctcccgctttagacgatttcagaataaacgccgagacgataaacgataccgccgcggcaacgatgacgcccgccagcacgccgagatagcttcctttcggcgtcagcgctaaaatggcgatgatgcttcccggagatgatgccgcgacaagacctgcgttaaagatcgagaatgtaagcagtccgctcgctcccccggcgatcgccgcgaggatcagcatcggtttcattaaaatgtaagggaaatagatttcatgaatccccccgaagaaatgaatgatcgccgctcccggagccgtcgatcttgaagagcctttcccaaagaacatatatgccagtaaaataccgagtcccggtccggggttcgcttccactaagaacagaatggatttacccgctttggcggcctgctcgattccgatcggacttaaaatgccgtggttgatcgcgttattcaggaacaggactttcgccggttctacgaaaacgcttgcaatcggcagcaaattcgcgtggacaatgacttccacacccgccgccagcaatttgttaagagacaggacgaccgggccgatcgcataaaacgcgataatcgtgagcacagctccgataattcccgccgtgaagttgttgatcagcatttcaaaaccctgtctgactttatctttaaatacacggtctaattgtttaatgagataaccgcccaaaggccccataatcattgcccctaagaacatcggaatgtccgctccgacaatgactccgatggccgccgtcgctccgacgactcccccgcggtgatcgtaaatcatttttccgcccgtatatgcgattaaaagcggcagaagatacgtaatcatcggggttaccaatgtattcagctgcggattcggaaaccatcccgctggaataaacagcgcggtgataattccccatgcgataaaagcgccgatattcggcatgatcataccgcttaaataactgccgaaccgctgtatcttcactttcatgccagcttgctgttcttgctgcatgttcattccctccctgtttgcttgccttcagatgaaaataaataagacacggggtttctctctctcccctgtgtcttcatcataaaacgcttccaattctcattcaatgaaaagtaaagaggagtttggcacagagactgtgacaactccttaacaaaaaaaagacacctcatcaaaggtgtcttaccgctttctgtatataatgtgtccttttgtgacaacgagtttggcaatgagccgctcactgacaataaacaccggatacgcacatacgagcgcgaaaatggcggccggcacataccgtgctgccggaaacatcggcatgacggcggttctggccatctgcacaagataaatcaaaagcaccgtgatcgcaatggccgcagccataatcggagctgatactttatattcacgcaatttcacatggcaatgcccgcactgaaactggcacgggatcatggatgatctgaccatgtcgcctgtaatcggcttgccgcagttcgggcaggtcgtttctttcatgtttattcctccattcaactcttctattataacagagtctgactacgtcttttacatttgtgattgttcaacattttttcacatattttatcatcaggctcttgtgtgcatatgtgaaaacatctactcttagagggaggttcatcactcattcgcataaaaaggaggatgcagaattgcttccgattcacagacagcaaaccttgcttgaatggctgaaagaagagggcgcgctgaaaatctctgacataagcgagagattcggcgtctccgagatgaccgtgtacagagacgtcaatcagttggcggatgcaaaccggattatccggacacccggcggcattacgctccctcccgcttcagaacgaagcgccaatcaatgcggctattgcctgcggccgattcagcattcgtattctgttcagcttattaccgtttcacaagccgttgagcagatgtgctgcattcattgcgcgattttgcggtatgaggataaaaaggaagaagtgtcccatgtcatttgtaaagattttcttctccagacgacgctgacggccgcttccgcatactttttagtccatgccgatattgaccttcactgctgccggcctcaggcgattcccttctcaacgcttgattacgcagaacggtttcaaaaaggattcggcggggtcatttgcacctttgacgaggcggcggacattatcttacacgacaggcagaagggatgcacctgcagcaagacataacaacaaccaaccggaaggcggtgtcatcatccatgagacagaacaaacgctggctcatctttttgctgttccttgttttgattccgaaaacaagcttcgcccacgcctacatcacaaactcaaatccgggtgagaacagcgaattaaaacaagcgccgaagcagattgaaattgagtttaatgaacagattgaagaaggcttccactccattaaggtctataattcatccggcgaacgggtcgatgcgggcaaaacggtgattcaaaaaaatgatgcccgcatcatgaccgcggcattgaaaaaaaatctgccgcatgatatttacagagcggaatggaacgcggtatcggccgacggacatccggtatccggcgtcatccctttcagtgtcggaaaagccggcggagaacttcaggagcagacatcatcgcaagcggcgcttcatcccgaagcggccatcgaccgcggtattttgtacaccgctctctccctgtttatcggcacggcttttttccatctgttttggtacagaaataataaagattcatcaaaagcaaaacgaactgtaaagctgctcgtgatttctttatgtgtaacggggctcgcacttatctgccagctcccgatccagacgaaagaaaacgcgggcggcgcttggagcgccgcgttccagccggactatgtaaaagaaacgcttctgaaaacggcaggcgggtacgtctggatgatccagatcagcttatttatcctgctcgccctgtccatgatcccgctgttgaagaagaaagcattccggtcatttgcgtactggacggcgccgctgttgttcttcttcgcttcgcttttggcaaaagcattcgccgggcatgcggcggttatcgacgaaaaagcggtcggcatcgcgatggactttctccatttatcggccgcgtctgtatggatgggcggtatcgccgcgcttgtgctgcttctttcatcagagtggagaaaacccgataaaaccatcgcttgggaaacggtcagacggttttctccttgggcgttcgcctctgtcggtgtgctgttattttcaggtgtgctgaacggatttttcattatccgcacgtttgattcactctttcacaccgcttacggtaagacgctccttttgaaaatcggactgtttgtcatcatgcttgtgctcggcgccgttcacgtatggatgacgaagttcagcagaaaaaggagcatcagcgcaacgataaaggccgaatgggcactaggcatcgcggtattatttacaaccgccgtcttcacaagcctgcccagtccgccgccgcctgcgccattgccttttaacggctcagaaacgatcggaaacggggaaaccctgtccttgcacattacgccgaaccagccgggtaaaaatgaatttcaagtcattgtcaccgatcacaacggcagcttggtaaaagacattcagcaatttacggtcactgtttaccagacgggcttcagcggcaaccagcatgaaagcacctttgatttgaagaagacgaaagaaggcacattcgaagccgccaacctgtccatcaccgaaaagggaaactggaagatcaaagtccacgggctgacaaacgattttaatgaaatcaaccaaatattctcaacgacaaactaaggagtgtatctcatgttgaaaaaaaaggctttattattcatatccgccgtgaccctgtcactcgtcggttttacggctgcagcaagcgcccacgtctcagtcaaaccggcggaatccgcggccggttcttgggaaacgtacacgatgaaagtgcctgtggaaaagaatgagccgacaacgaaagtcgtgctgaaaatgcccgccggcgttgaatttcagcagtatcagccgattccgggctggaaaacatccgtatccaaacatgatgacaaagcggtctccgtcacttgggaagcaaaagacggcggcattcagcccggccaattccagcagttcacgttcgttgcgaaaaatcctgaaaagagcggagatgccgcttgggacgcttaccaatattacaaagacggcagcattgtagaatggacgggtgatgagaaagccgacacgcctcactcgattacgaaaatcacgaaatcggccagcgtgacggatgcgcacggagctgaacagtcaaacgaagaaagcaaatccggcgtatcagcgcttgatattgcagccatcgttctgtcagctgcggcgattatcctttccatcgcggcgcttgtaaagaaaaaacgcgcgtaagcaaaaagcgatccggctctaaagagcctgcgatcgcttttttttcttatccgcggcctgcctggaatgacggatatttggtcattcccccgtcagcaaacagcgtaatgccggttacgtagcttgattcctttgaagcaagccagacggcgacagccgcgatttcttccggctcaccgatatatcccatcggaatcatgctttccacatcttttctctgaacgggatccgcaaatttttccgcgttgatcggcgtattgatggctcccggcccgatgttgttgacacggatgcgcttcggcgcgtactcaagcgccagcgtttccgtcatcaatttgatgccgcctttactcgccgcgtagtgaacaaacagaggccacggaatcatttcatgtacgcttgacatgttaatgacgtttccttgaatatcattctctacgtaatatttaatggcttcgcggcttcctaagaaagcgccggtcagattggtattgatgactttgttccagtctttgagcggcatttcatgcgactgaaccggattttccataccggcgttattgatcatgacatccaatgtgccaaattccttcaccgcggtctgcacgatgtttttgacatcttcttcttttgtgacgtcgccttgaatgatgaccgcttcgcctcccgctttttgaatctcttctttaacggtttgggcgtctttttcattactatagtagttaaccacgactttcgcctgctcctgtccgaagcggatcgccatcgcttttcctaatcctgatgaagctcccgtaatggcaacgacttttccttttaaatccgtgtacatgttcaaacctcctgcatttgttatgaatttgatttcgcaacgcctaagaataccgcggccacaatgatcaggataatcccgatggcaatggcgaccagctgacgcttcgttttgctctcacggagaatgaagattccgccgagcgtgctgatgacgatccccatttgagagagggaaaaacttgtcgcgactccgacgcgcggctgtgagatgaacagaaacatattcccgagcgcccagatgattcctggcagaatgttcttgagggcgtacttattaaacggtttatgcttgtacgtcaggagcagcccgccgatgaccatcccgatcgcctgcggcagaagcgctgaccatccggatacgccgaacagccgggccacaacgacatagaccaaataaccgagcgtggagatcagcaggatgacaatgcctttttttaagtttcccggttctccgtccgcccgcccctttttatcttctaaagatgtgagcacaatcccgatgatgataaaaataagggcgagaatacccagcgtaatcgcgatcggggttgaccattctttgaatacgatcacaccgaacaaagaagtcgagacgagctgcattcccgttgatatcggcatcgtttttgaaacgcccatcagctgtatgctttttagctgattgctttggccgagcgaccaaaacagccccgagatgatgccgacaataaaaatgcgcccagacagcaccgggtggacaaacagatacaacacaaacgaaacgatgagcgccccgattgtcgttcccagcgtctggctgtaaggcccgccgcctaatttgacgttaaataacacgatgctcccccaaaataaagccgggagaagagccagtaatatatccatgatggcgaccttctttcaatcgtatttgctgttattttgtctggaatcgaaccgattattcccgcaagatcaaaaaagcctgccggcgatattcaccggcagactgctcaataaaaacagccccgcttagaagcggggctttcttttcggctcattaaagtccgatagacatgtatttggtttccaggtacggttcaatgccttccgtaccgccttcacggccgatgccgctttctttcattcctccgaaaggcgcttgaaccgcggacggaccgccgtcattccagccgatgatgccgtattcaagctgttcagaaatatagatgccgcggcggtagttttctgtgaagaaataagccgcaagcccgaacggcgtatcgttcgcaagcttgatcgcttcatcaatatctgagaacgtaacgatcggcgcaaccgggccgaatgtttcttcatgcatgatgttcatggatgtatctacgtttgacagcacggtcggcgtcacgaaatagcatcctttttcatcgttttggtcatacgttccgcccgtcagcacttttgcgcctttttccacagcgtcattaatttggccgacgattttatcgaagccttttttgttgatgacagggccgacgtttacgcctttttcaagaccgtttccgactttgagtttcgcagcttcttcactcagttttttcgcaaactcgtcttttacggattcgtgtacgatcagccggttcgcacagacgcaggtttggccggcatttctgaatttagaggccattgtttgggctaccgccagatcaagatcagcgtcttcatccacgatcagcggcgcatgtccgccaagctccattgacatatgttttacggtgtcggcgctgtttttcatcaggattttgccgacaggcgttgagccggtaaaggtaattttgcggattttcgggctgctggtgaagacgtttccgatttcggctccgtcaccgatcaccacttgcagcacgtccttcggaattcccgcttcatatgcgagacgcgcaagggcgtaagcggaaagcggcgtatcctccgccggtttgatgatgaacgtacagcctgccgccaaagcgggcgcggcttttcttgtaatcatcgcattcgggaaattccacggcgtgatcgcggctaccgggccgaccgcctgacgggtgacgacaatccgtttgcccgttgtcggcgcaggtactgttctgccgtaaatccgttttgcttcttcggcgaaccattcaatatagccggcgccgtataaaacttctccgaccgcttcttcgtacggtttgccgttttctttcgtaattaattccgcaagttcttctttattttcaacaatcagctcataccattttctcagcagtgaggcacgttctcccgctgatgttttggaccatgattgaaacgcttgatgtgaacgttcaatcgctttttcaacatcttcagccgtctgctgggggatgctttcgatcgcctctcccgttgccgggttgtacactgttaattgttctggcatattgaacattcctttctctgctatagtaaagccattgaatgctagttgatgtatctcacactttcatgatagcagacacatccgccggcattccaataattgaactcacagagctgcttcgataatggaaaggccttctttgagctgctcatccgtcacgacaagcggcgtcaggaatctgataatgttgccgttaatgccggccgtcagcagcagcagtccgttctcgttcgccgttttggcgatcgccgcggcttttgctttgtccggttcccgcgtgtccggatctttgacaatttcgatggccgccatcgcgccgagtctgcgcacttctccgatacaggcatgctcttttttccactcaagcgcttgatgctcgatgatccggccgatctcctcggaacgctgattcagcccttcttcttcaataatatccaagaccgcaagcgcagccgcacagccgagcgggcttcccgcatatgtgcccccgagttcccccggcgcggcggcatcaagcatttccgcccggccgatgacgccgctgagcggcaatccggccgcaagtgatttggaacaggtgatcaaatcaggaacggctccgaaatgctcaatcgcaaaatatgttcccgttctggcaaaaccggtctgaatctcatccgctacaaaaacgatgccgtgtttttgacaaaaagcggcgacgtgctgcacgaaacgttttgacggaatgatgaagccgccttctccctgaaccggctccatgacgacacaggcgacggtttccggtgcaactgcggcgataaagaaatcctcaaaagcgctgatgataaagtcgtcatactgctcgtcgctcatgccggccggtttttgataatagtaaggaaacggcgcctgatacacctctgaggcaaacgggccgaaaccgaatttataaggcttcaccttgctcgtcatgctcatcgtcatgttcgtgcggccgtggaaccctcttgtaaatgacacgacagcctggcgcttcgtatattttctggcgattttcacggcgttttccaccgcttccgcccccgaattgagaaaaatggcttttttcgcatgatctcccggcgcaagggcgcaaagtttttcggccagttcaatataagacggatacatcatgacgttaaatcccgggtgaatcagatcctccgcctgtttcttcacggcctccaccactttcggatgggaatggccgacattcagcgttccgatcgctccggcaaaatcaatgaatcgtctgccgtccaaatcgtacaaaagcgccccttccccttttaccgccatgctgcggtttccattgccgacccccttggaaacgaattgatcccgtttttgctgccactgggcagttgtcacttccgatgatgctgttcgactcatagattccatccccctgcattgttttcttatcattctgacttctttttggtatgatgaaaagtaccaaaatcaatttatccatggtatcagaaaggggcagggtctggatgctgacgatttccattgatcattcggaaacggcggattatatctatcagcagatctatcagcacataaaagcggccgttttgaagcgcagtctgatgcctcatacaaaggtgccgtctaaacgggagcttgccgagacgctgaaggtcagcgtaaattcagtgaattcagcttatcagcagctgctttcggaaggttatttatatgcggtcgaaagaaaaggctttttcgtggaggaaattgatacggtttatcatgaagaaacgccttcgctcctattgcctgatgatttgaaagagcgggagacggataagagcggctggatttcgttttctcatatgagtgtggatacggcgcatttccccctgaaaagctggttccgctgtgagcagaaagcagccgcccgttcatttcatacactcggagaactcgtccatccgcaaggcttatatgaagtccgtgaaactatttcgcggcttatttccctgacaaggggcgttacatgccgcccggaacaaatcgtgctcggagcgggcacacaaatgctgatgcagctgctgacggaactgctgccaaaagacgcgctctacgccatggagaacccgggatatatgaggatgtatcggctgctgcaaaacctcgggaaaaaggttgcgacgatcagccttgatgaaaaaggcatgtccatggacgaaatcgaaaaacgccggccctctgtattgatcaccacgccttcccatcaattcccctcaggcgtgatcatgcccgcttcccggcggattcagcttttaaactgggccgccgaacagaacggccgcttcatcattgaagatgattatgacagtgaatttaaatatgacgccgatacgataccggcgcttcaaagccttgaccggtttcaaaatgtcatctacatggggaccttttcaaaatcccttttcccaggtctgcgcatcagctatatggttctgccgcccgggcttttgcggacgttcaaagagagaacgtatgacctgcaaacgtgcagcacgcttgcccagctcgcgcttaaagaatttatcgaatcaggtgaatatcagaaacatattaaaaagatgaagcagcattataagaacatgcgggaacgcctcatttcggccttggaagaaacattcggagaaagaatcagtgtaaagggcgccaatgcggggcttcattttgtcactgagtttgaatgcgcccgttcagaaaaagagatattggcacgggcggatgcagaacagctcgatctgtttgcgatgagccgattccgtctgaaagcgggaggcgattcaaataagccgcagcttatcctggggttcgcacgcctgaaggagagcgatattcaagaaggcgtctacaggctttaccgggcggttttcggcgcataaaaaaacccccggaattcggggacttatttaccagcggtccggttctgtctgcaaaatcgcctccagcaggccgggaaacgccgcttgtaaatcatctttgcgcagggaataataacggtgcttcccgtctatgcgcacttgggcgatccccgcttcccgcagcactttgaagtgatgggacagcgttgatttagcgacccggacatcagcgcaggttccgcacgttttttctgttgtttccgccaattgtttgaccagctctaagcggagcggatcactcagagcatgaagaacctttgtcagctgtaagcgttcggtttcaggatggtttggaatgttcatgagtcaaatgtaacacagatcatcggcgggtgacaatttaggcggtgagggtttttcctttaccattcgcagcgaaacatgttacagttagttcgataatattcgaactataacaaataaacccaatcaggaggaataacaatgatcgtcttacaggcttacatgaaagtaaaagcggataaacgcgaggaatttttaggagaagcgcaatcacttgttcagcattcacgcgcggaagaaggaaatgtgcaatacgatcttttcgaaaaagtcggtgaggaaaatacattcgttatgcttgagcaatggaaagatgaagaagcgatgaaattccacaacgcaactgaccatttccaaggattcgtggcaaaagcaaaagaagtgctgagtgcgccgcttgacgtcgtccgcacagaactgtcagagtaacgaaaggatgaatgacatgaacgaagtccttcaaatattaacagaccaccgttccatccgcagctacacagatgaacccgtatcggatgagcagctggaccttatcatccaagcaactcaggcagcgccgacttccattaacggccagcaatttaccgttattgcggtgaaagataaggagcggaagaaaaaaatatccgaattggccggtggccagccgtggattgaccaagcgcctgttttccttttattctgcgctgattttaaccgcgctaaaattgcgcttgaagaatataatgatacaccgcttgagatcacgaacggtttagagtccgttctagtcggagccgtagatgtcgggattgcgctgggtacggcaacggctgcggctgaatcaatgggactcggcactgtgccgatcggcgccgtgcgcggcaaacctgacgaactcattgaattgctgaaacttccgaaatacgttttcccggtttccggtctcgtcatcggccatccggcagaccgctccgcgaaaaaaccgcgtctgccgcaagcagccgttctgcatcatgaaacgtatcaagaagaagatgtaagaacccatatcgaggcctatgacaagcagatgtccgaatacatgaaaaaacgcaccgacggacaggaaacaagaaactggtcacaaggcatcacttcctactataagcaggtttattatcctcacattcgtgaaatgcttgaaaaacaaggatttaagacggataaataaacgtatcagcctgccggaacactccggcaggttttttctatttctcaaacaaaagcgttgacactatgtaaaaatttttgttaatattttcatcatatactcattggttttctgtgaaccgatgggttttctattgtgacgaaagaaggaatctgggcttatgaatgataagaaaacggatattctgctggcggcaagaaagcttttttccgggaaaagcttttcgtcagtttcgatgcaggcgatcgcagaggagtgcaaagtctccaaagcatctttatataagctgtttgaatcaaaggaagacctgctgttggagctgctcgactttaaccagaaacagatggtagccgccgcttcattattgaatgaagaaacaagcctctcccctgaggaacggtttgccaaaaaactgatggctgagcttgaaggcttcaggcgcaatcagcagttttttaatatgctgatgtacggaagcccctcttccattaatgaacgggtaaaacggcatattcacagggcccgctccacctttatctgctggcatcgcgattcactgattcagacgtacggcgaagacattattccttatgtatgggagctggtgatcgtcctgcaggggctcctgagagaatgcatcacgctgattaagctggaaaaagaaccgctcgccctggagccgctcacggagtttatcatccgccacctcaatctcatcgtcgaaaacaggacagccgaaaccgctttgcctcaggagatgattgacctttatatcgcctccgcttcctcatttgagcctaaagacaaaaccgtattgctggctgaaagcctgaaggaactgaaagaagccgtctcagcccttccggaggaaaaatatgacgccgcaggactcgcttccgcggcggctatgctggagaaagaatcagcggacaaacagccgcgggattttctcatcaaagcgcttatcggttatttggagcaggccggaccgctgcaccagccgcttgcagccgttaaaacattgctcaaactataaagaaagaaggaatcagcttgaataagagtattaaaactgcaccatacaaccgctctgtcattgtcgggattcttttggcgggtgcgttcgtcgccattttgaaccagacactgcttatcacggcgctgccgcacattatgaatgacttcaatatagacgccaacaaagcgcaatggctgacaacatcgtttatgctgacgaacgggattttgattccgattaccgcgtttttaatagagaaattcacaagccgcaccctcttgatttccgccatgagtattttcacggcgggcaccattgtcggcgcattcgccccgaactttccggtgctcttgacggcccggattatccaggcagccggtgccggaattatgctgccgctcatgcagacggtatttctcacgattttcccgatggaaaagcgcggccgcgccatgggtatggtcggcttggttatttcgttcgccccggcgatcggcccgacgctttccggatgggcggtcgaagcattctcttggcggtctttgttttatatcatcttcccgatcgcagtcatcgatttgcttttagcgattattctgatgaaaaacgtcacgacattacgagaaacacagattgatattgtatccgtgatcttatcgaccctcggattcggcggtctgctttacggcttctcaagcgccggttcatcagggtggaccagtactgaagtgctgacttcgctgcttgtcggagcggtcgcactgattttctttatcgcaagacagatgaagctcaaaaaaccgatgctggaattccgcgtgttttctttcgggattttcagcctgaccaccctgctcggaacgcttgttttcgcgctgctgatcggaacggaaaccattctcccgctttacacgcaaaaagtccggggcgtatccgcgtttgataccggattaatgcttttgccgggcgcgattgtgatggggatgatgtctccgtttatcggccgggtgtttgacaaaatcggcggaaagggccttgcgatgaccggattcttcatcatcctgctcacgtccctgccgtttatgaatctgacggactcgacgtctctcatttggattgtcgtcgtttataccgcgcggcttttgggaacagccatgattatgatgccagtgacgacagcgggtatcaacgccctgccgcgccacttaattccgcacggcacagccatgaacaataccgtccgacaagtcggcggttctatcggtacggcgctgctagtttccgtgatgagcagccaggccgcgcacgcaaatgcgacaactccggcaaacgccgccctgcacggcatgaatgcggcatttgtcgtagccgcctgcatcgcgctggccggcttcctcctatcttttatattgaagaaaaaaccgcgtcagcccgagcagcagcaggccgttacgcggtaaaccaaaaagaacccgatcacgtatgtgaccgggttctttttttacttctcgattccgtctttaacttctttcaccatttgcgccatggattccaggccgcctcctgataaataccatgtagctgaatcaaggtagacaacatggttgtttttcacggctttcaccgattttacataatcattttcaaccacttgttttgttgaagattttgtgccgatcgctgttccgcggtcaacgacaaacatataatcagggtttgttttggcgatatattcataagaaatgctttgtccgtgcaatgaggcttcgatgtttttgtcagccggtttgacgccgaacacatcatgaatgaagccgtatcttgatttagatccgaacgcgctgattttgccgtcgttcgccatcaccactaacccgtttttatccgtgctgcttgtctttttcttcagatccgcaatggatttgtcaattttcgcaagcttatctttcacttcattttctttgttaaagattttgccgatcacttcggtgttgtgcttgaatctgtcaacgtagtttgtatagtcatcatcaaggtaaatcgtcggcgcgatttttgagaactctttataagaatcagattgtctgtgagcgataatgattaaatccgggtcaatatccgcgactttttcaaaatccggttcttttaaaccgcctgtattggtgtatttatcacttttatatgaagataagtattttggaatgttttgtttcggaagccccgccacatgatcctgtaaaccgagttcatccatcgtgtccagcattccgaagttgaatacgacgacttttttcggattcttcggcactttgacgccttctttgttcaggtcatctttgattgtgattgtttcttttgatttgcctgatgttttgtccccgtttccgcatgcagaaacaacaaaaatcgtaacgagcgcaatgaatagcaatgcgaattttttcatgattttcacctcatctggtttttaagaaaagtacacaccgatccgctgactgtcaatctcttgaatctggatggtcatatcataaatatcttcaagcacggaggtttcaatgatctcctccgccggcccttctttgacgatccggccgtttttcagtgcaacgatatggtctgaatatacggatgcgaagttgatatcgtgaatcactacgacgaccgtttttccgaagtcttccacaagccgcttcaacagcttcatcatttcaacggaatgcttcatatctaaattgttcagcggctcatcgagaaaaatatagtccgtatcctgagcgatgatcatcgcgataaacgccctctggcactggcctccgctgagctgatcgagatatttatcctttaagtcatccagcttcatataactgagtgcctggttgatatgcacccaatcttcatccgtcagtttcccctgggaatacggaaatctgccgaagctgaccaggtctttaatcgtcagcctgatattgatttggttcgtctgcttcaggatgctgattttttttgccagatcgttgcttttacaggccccgatctcttgcccgtcgaccgtgatttccccggaatccgtcttaatcagccggctcatgatagacagcagcgtgctttttcccgcgccgttcggaccgataaatgaggtgagcctgcccttttgaatggatagagacgttttctcaaggacggttttccctccgtattgtttgcttacatttttgacctctaccatgatttattctcctttaacagcagatagataaaataaatcccgccggcaaaattaatgatgacgctcagcgtcgtggaaaacgtgaacactttctccacgacgaactggcccccgacgagcgcgacgatgctgatcaggacagaacccgcgattaaatacgtgtgcctgtaggtttttaaaaactctctcgccagattgacgacaagcagtcctaaaaacataatcggcccgacaagagccgtagagacagacacaagaatggcgacgacaatgagcatctgtttcacaagcttatcgtaatcaatccccaggttgacggcgtgctccctgccgagcgacagcacgtcaaaaaaccgcgtgaaccgccagacataaatgcccgtcagaagaaagacagcaccggcaaaccataaaagatcggtgttgatattgttaaagctggcaaacattttgtcctgaacaacctggaactcattcggatcaatcagcatctgcatgaaggatgacagactgttgaacagcgtgccgaacacgacgccgacaagcagaaggaaaaacacgttccgcccctctcctttaaacatgagctgatacaaaacgagtgacaagagcaccatcagcccgacggagatgacgaaattaagatttttgttcatcatgacgatattcattgaaccgaacaggaacacgatgacggtctgaatgagcatatacagggaatcgaggcctaaaatgcccggtgtcagtatgcggttatttgtaatcgtctggaagatgaccgttgaaaacgcgatcgctcctccggtgagcatcatggcaagcactttgaagcatcgtctcggcagggagtattcccaattgcccagtccgtagaacaggaagaatccgatacatatcatggcgagcgccgccagcagcgtaatttttttattatgactcatatgcttttctccttaacagcatatacaggaagatgccgctgccgataacaccgaccatcaggccgatggaaatttcgtacgggaagatgatcacccttcccaaaatgtcgcaaaacagcacaaaaacagcgcccagcagagcggtgtgaggcaggctgctcctcaggttgtcccctttgtaaatcgacaccatattgggaatgatcaaaccgagaaacggcagcatcccgacggtcaggatcaccagtgaagcgatgagcgacacgataatcagaccgatattaacgacgcgtttgtatttcaggccgagattgacggaaaagctctctcccattcccgccaccgtaaatttatccgcatacacataagcgatgatcaccagcgggatactcagatataaaagctcataccggcctttgacgaccagtgagaaatctccctgcagccaagacgacaggttttggatcaggtcatatttatatgcgataaacgtggcgattgagctgacgatgttcccaagcattaaaccgacgagaggaataaaaatcgcatcattgaacttgattctctcgaggattttcatgaaaaggaaatttcccgccaacgcgaaaacgaaagcgatagacattttcacaagcggactcgctgacgtaaaaagcattaatgaaatcaagattccgagccttgcccaatccatcgttcccgcagtcgtcggcgatacaaatttattccggctgatctgctgcatgattaatccgcagatgctcaggctcatgccggcgatgataatgctcaccaaacgcggcagccggctgtcaaacaatgtacccgcctgttctttatttaaatgaaaaatatccagcggcgacaaatcttctacaccgataaatatagaagtacacgccaaaaccgccagtagcaaaagtaagtaacgtagcttcatgctgcctccctgcacccatcacaaacggtatgactgattgccaaacaactcccatatatcccactcgtaatgattatcattatcaacgacaattataatcttatcatctttccaagcgcagtcaatacagttttgctttcaaaagcggtcatccgcgggccgtacactaaattgtcttacaatcagtctatcaagaatttgcaggattttctataacctacatttggctgcttatcattttttgcacatgataacacgcttgagggaaacaaatctgacaaacagcggcaaaattcctccactaaaatacaaatgttctctccacgtagaaaaaatccttgatttacatgtttgaaagagagataataaaaattaaatttgtgagaaaatttaaatattaggggatgtaaatcatgaaagttgtaaaattcggaggcagctctcttgcgtcaggagcccagcttgagaaagtgtttcaaatcgtgacggctgatcccgcgcggaaagccgtcgtcgtatcggcaccgggaaaacgcttctcggacgatacaaaggtgacggatctgttaatccgctgtgcggagcattatttgcaaaaaggtgcagcgcccgagcttgccgaaacggtcattgaacggtacgccgccatcgcgcgtgagctgaacctggatttctctattatagaaagaatccgcagtgacctattcgctcttttaaacagctgtaaaaccaatcccgaacaatatatggatgcggtgaaggcgagcggcgaggacaacaacgcgaagctgatcgcagcctacttccgacagcagggcgtgaaagcggaatacgtaagtccgaaagaagcggggctgtttgtgacgaatgaacccggaagcgcgcaggtgctccctgagtcttatgatcatttgtaccgtctgagaaaccgtgaaggcttgatcatttttccgggattcttcggttacacgaaggagcatgagattgtgacgttttccaggagcggttctgatattaccggctccattctcgccagcggcttaaaagccgacctgtacgaaaactttactgatgtggacgccgtctattccgtcaacccgtcaatcgtgcggcatccgaaagaaattaacgaactgacgtatcgggaaatgcgtgagctctcctatgccggattttccgtttttcatgatgaagcgctgattcccgcatttcgggccggcatccccgttcagattaagaatacgaataatccggatgcgaaaggaacacgcgtcgtcagcagccgtgacaatacgaacgggccagtcatcggcatcgcaagcgacacgggcttttgcagcatttacataagcaaatatttaatgaaccgggaaatcggtttcggccgcaaagcccttcacattttggaggaagaaggattgacgtatgaacacgttccatccggcattgacgacatcacgatcatccttcggcacaatcagatggactcagaactggaacacaggctcgtcacccgtctgaagcaggaacttcaagcagatgaagtcacagtcaggcacaatctggcgctgattatggtcgtcggggaagcgatgcgccataatgtcggcacaaccgccagggcatccaaagcactgtcggaagccggcgtcaacatcgagatgatcaatcaagggtcatcggaagtcagcatgatgttcggagtgaaagaagaacaggaaaaacacgcggtgcgggcactgtatgacgaatttttcgccggagtcttactctcataggacacagcctcttttttctcttgtccactaatatcccttacaaagcagcttcttttacatattgtatggtatagacaatatggaggtgaagctcatgtcaggatattctggaatcagctctttcgctttgatcgttgttttatttatcctgttggttattgtaggtactgcctatgttggcggtttctaagcatcactccgtctatatgaggacgctgcgggttttgacctgcggcgttttcttttgttttccgccgctgtccgagtccggccgcgcaaaaaaagactgccgggaacattcccaggcagtcttttcctttgttctggttattttctcctcacgtcattcctctttcagctacatggaattcagcctgatctgtctggcctgcacctgtcactgtaaaaatcgcggcggctgctaaacaaataacaaaccatttagatttcaatttcatacaaaccctcactcctttgtatttgtttccttgcctcttcgactttcagaaaatagtcagaagaaattttaaagcaattttgttcatagtaatatttagctgcttctagtgctaaatcctctatatcggcgtataaatttttatcttccaggtaacggaaacacgcgctgattgtctcctcatccggtttcgcctgatacagagcctgcagccattcgaattttaccgtgtaaacgggatcgtctgtttctttagcatattcatatccccgcttgtgatattccgacgctttttctttttttccgagtttaaagtaaatgagtgtgattagaaaatatgcttgaggaagagaattgacgattctttgtgattcaaatgtatcgaccgcccgttcaaagtacggaatcgcttcgccgatgcggtcctgattgtagtagcacagtccgaggttatacagcgccctcccgacaagctgcgctttttgttctttttcggccatttgcagagcgtgctgaaaatgtttggccgcctgttcaaagcgcctttcatccattaaattgacgccgaatacaaaatggcattgaatgatccggacgttatatgtgtcctgctctacgtaaatttcataagcgttttttatatgtatcaaagaaaaatacgtttgtttcatatgataataagcttcggccactttaaaataaaactccgcccgttccacgtggtccgatacgaaggccagttttttctcagcttgtttataatatgtaatcgctgagataaattctcttttatcaaattcaaacatgcctttgaaaaagttgacgtaataatcgagaagccctttgaggccggcctggctgttatcaatgttatcaagaatttccgacagggtcggctggtcttctatcttcagtttttccagcggctccaagtagtccagcatcagctgatggcgaaattccatgagggaataataaagcactaagttcgaatcaggctccatatggtcaagctcttgtttgatctcggccttcaagatctccgcatccggcacgctgaatgttctgatgtatcgataccactcgttaattttctgcccgactgctgaagaaggaattaacccgctcttcattccttcaccctccccatccaagacctgtttaccagttattttatcacgtttccgtctctttccatcccgaaaaacacgcaaactttgtttcggcagagcgcaattttccgagtggagttaaaacagacggcggccagacggaaccgccggtttcaagatgattcatgtttcgtattcagcggaaggcggattgtaaaggtcgtgccttttcctttttcgctgtcaatatctatcgtgcccttgtgcatttcgacgagctgcctgacgatggacaggccgagtccgtattcgccgtatgccgtattcgtccgggacacgtccgccttataaaaccgctcccatatatgctcaatttcctctttggagatgccgatcccggtgtcttcgatttcaatcaccgtttctttatagccttcatacccgcgcagcgtgatgtctcccttttgcgtaaattgaatgctgtttttcgtgatgttgacgagaatctggatcagcctgtcataatcggcgaacactttgacgccgtcctccacttgaatccgcagctgattttgtttttcctccgcctgctgattgagatgctctttaataatttcaaacacctcgatgagcggcagactgagcttgtccagtttgatttgctgggatctgattttttcataatccaggttttctttcacgagcctgagcatccgcttcgtttcttcgctgatcagcgagaagcatttctctttatctttttccgggatggtgttgctgttaagcccctccacaagtccgttaatggtcgtcaaaggcgttctcagctcatgggagacatcggcgataaattggcgcctccgtttttcaaggcggtcaatctgctctctcgattgcttcagatttttggccatgatgttgaaatcggacgccagcatgccgatttcatcgccgccgctgttcttgagcgaaatatcgtaatcaccggatgccacttttccggtcgcatcccgcaatgtctgaatccgcttgacgtgaaatttagataaaagccagctcagcagaatcgtgatgataagggtgctgatgatcgcgtaaaacatatagcggttgacctggctgatcatctgctcgacccctctgacgggagacacgagcagcaccgcgcctttaaattgatcgttgataaaaagcggctttgcgacaagcgatacttctaaaccttccgtattaaaacggttcatctccgctctgatctgaacggttttcccttgcttcagcatgtgccactctttacttttcagcttctcgcgcggcggcatatcgtcaggaaaaaagtaaggccgctgatgttcatcgaaaataataaacctggtctcgcgcgtttttaacatgtcctgatacggatacaggcggcgcagatcaagatcgcggccgttcagctcacttgtgatctgctgcgcgtaagaagacagctcgtccactttattttgatacgcaaaatctttcacaaagtgcgaaaacaaggaaatgatgatgaaaaaggccaaaatcaaaatgctgacatggcttaacagcagctgatataagtatttaatcctcatcaaatttgtatcctaccccccacaccgtgtataaaaacggtttttcctcactggacagttttttgcgcagccgtttaatatgaacatcaaccgtacgttcatcgccgtaaaattgatagccccacacctgctcaagcagctgctctctcgaaaaaacctggcgcgggttttgtgcgagataaaagagcagatcgaattccttcggcgtcagattctcgacaggttttccgtgcagaaacacttcccgcgtcttcttattgattgaaaaacacgccgtttcgatcaagtcgtcgctttttacggcctgccccgtcgcccggtatcttctgatcaccgctttaatccgcgctactagtgtcagcggactgaacggcttggtgacatagtcgtccgcccccatttcaaacccgatcacctgatcagactccgtgtcctttgcggtcagcataataatcggtacactgctcgtctctcttattttccggcagattgtcactccgtccatggatggaagcataatgtccagaatgaccaaatcccagtcctcttccgtgaaacgctgatagccttccactccgtcatggacaaattcggcttcaaatccttctttaaaaaagaacatttccgtcatggtgcatacgcttatattgtcttctatcattaatatcttcattggttcctccgcttatcttcacgctttttcttataatagcaccattttacccgggtgttttcgggtttcacaattgttagtttttatttcatcacccggaaatagtttattcatatttttttcatacatttctcctactatatacatatcaaatggccggtgctaaagaaggccggtttcacaagatctgacacccacacggaggaacagacatgaactttataaaaagagccttttggagcatgaaggcaaaaaagggaaaaacatttttgcagctggttgtgttttcagtgatttgcatttttgtcctgtccggtcttacgatccagtcagcggcaaagaaatcaagcgaactggcaaggcagcagctcggcgggagcgtcacactccaggctgaccgccaaaagcaaatggcgcagcagcaaaaagacggtgaaaagaggacgtttgaatcaacgccgatttccgtctcagatgccaagaagcttacatctttacagcatgttaaaaattacaacttcctcacgacagcgtcagcaaatgcagaaagctttgatgcgataaaaagctcaggcgaatcagccgataaccgttccggcgccggccgttttcaaggcggcggaagacagatgatttcagctgatatctcgatcgaaggcgtgctctctacggcattgcttgatgatttcacaggcgggagctcaaaaatcactgacggccgcgccatcataaaaacagatgcggacgcaaaagtcgccgtgattaatgaaacgctggcagatcaaaacaagctgaaggtcggcggctccattaccgtttcctcagcagcggatgattctgtgaaaacgaagcttaaaattgtgggaatctataaaacaacatcatcaggagacgatcaggcacagcatttttcattcttaaatcctgacaataaaatctatacgccttacactgccgcggcggcgttaaaagggtctgataacaaaaacaaaatcagctcagccgtttattatatggatgatgccaaatatattgactcattcgttgcggctgcgaaaaaaacatctatagatgataaaacctacgcgctgacgacaaatgatcaggtgtatcagcaaatggccggcccgattgaaaatgtcgcgtcattttctaaaaacgtggtataccttgtatccatcgcgggcgcggtcattctcgggttgatcgtgatgatgtcgatcagggaacgcaagtatgaaatgggtgtcttgatggcgatcggcgaaaagcgctggaagctcatcggacaattcttaacggaaattctggttgtcgccgttattgccatcgggatcgcatccgtcacgggcagccttgtggcgaatcagctcggaaatcagcttctttcccagcaggtcagctcagccgatgattcacagcagcaaacaagcggctggggcggaggagaaatgccgcggggaggcggcatgttcggtcagcattcatccggcgcggatgtcatcagtacaatgcaggtaaacgtctcgctgaatgaccttctgattcttggcgacatcggcgtcgcaattgccgtcatcgccacattactgccgtctgtatcagtcatgcggcttcaccctaaaacgatcctgaccaagcaggaataagaggaggcagcataatgagcctattaacctttcaacagaccggctactggtaccaagacaaatcacagccgctgtttcaggatataacgatcagctttgaaaaagggaagttttatacaattgtcggcgcctccggaacggggaaaacaacgtttttgtctctggcgggcggccttgacacacctaaagagggaagcatcctttataacggaaaagacatctccaaaatcggattaaccaaattcagaaatcaatatgtctctatcgtctttcaatcttatcatctgatcccgtatatgacggcgctccagaatgtcacaacggcgatggagatcaccggctctaaggagaacagcaaagatgcgttcgcgctcagcatgctgaaaaaagtcggcatcaccgaacagcaggcccgtcagcgggtgctgacattaagcggcggacagcagcagcgcgtttcaattgcgcgggctttcagctgtaacacggatttgatttgcgcggacgagccgacgggaaatctcgacgaggatacgtcaaaggaaatcgtccggctctttcaggatctggcgcataaagacggcaaatgcatcatcatggttacgcacgacgaacaaattgccaaagtttcggatatcaacatccgcttatcaagaggaagtttcacggttaaaggaaacggcacggccgtttcctgataccgcgcccctgccagcgcagacaggggcgcaccctatatcccccttttcaatagaagtgaacgtaaaaagagcgagggctgcatccccccgctctttttatttatatcagctgtaaataacggtccatatttgattgtccggctgctttgatcaattcttccgcctttttctcttctcccggcaaagcgagccggagtttgtcttcaatgtctttttcagaaagaccgtttcccggcgctcccttcggacagtcgatacgtgtttcatagacatgaccgccggtagccgtgacccgcacaattgtaaaacggcccttcggaacggcgttttcagccggctgaatttggtcatcgcaactgcggtgaatccgctcaaatcctttttgaagggattccggaatcggcgcggatgtgaaatgttcaactgaaaaatccttaccgtgcaaagctaaggtgatcacatattccacgctgaatctccccgcttcgcctgttttcggacgccgttctgtcaatgcggcgtcaccgcccggcggataaatcacgtcgatccgttccgtttggccgaaagtgagaccatgttcggccttcagcttgagaatggcgtccgccgcatgatgagccgccgagcaaaacggataaaccttaaaccaaagtcccgggctcacaatccgccaaggttttccccacccgcttacaaggagggtttctgcccgttcaagatcgccgtacagtccgaaaaaacctttctccccgtcgagcgcatgaactgagccgccgataccggcctttgcaagctgcacggcgaacaacccggcttgagcggccagtccggcgtggagcggcttcatttctgtcccgaattgcactctcatgcctccggagcgggcagccgcaaacccgattgctttctgcaattgggtttgattcagattctccgcgaatccgacggcgcatgcggccgcaatggcacctaacgttcctgtattgtgccagcctttctcgtaatgatgccttccagctgactcgccgagccgcgccatcacttcgattcccgtcacataagcaccgagaaaacggcttttgtctatacggccggctgatgcggctgcaatcaaagccgggaggatgactgcgctcggatgtcctcttacatcagaatgaacatcgtcaaaatcaagcgcatgtgcgatgaatccgttaatgagcgcggattgggacggcgtggttttttgatttctgccgataagcggcgctatcggcaccccgccttcttcttcggccagttttaccagcttttcaactcctttatcccgtctcccggcaaaagctgccgctgtaaaatcaagcagtcctttgcgcgcttctttcatcgcttcagcggatgtttccggcacagacgacatgacggcctgagcaagcccggccgtcagattttccgtattcattccgtctgctccaatacgttgacggcaagccgggcgaaaaactcagccgctgccgggagcgctttttcgtcgagtgtgaaggcgggatggtgccattcttccgttccgtttgttcccatccagacgaagaagccggggattttttcttgatataatgcgaagtcttccccgccgggcgactgttctgcccgaacggtttgaagcccgaggctttcagccgtttgttccgccgcctgtatgaaacgggcgtcgttcatcactgacggaaggtaaggataccagcggaaatcagcctctgccccgaatccggccgcgattccttcagcaacccgcttcatatgtttcggaacagcgtcacgcgcttctttttgaaacgtccggacggtgccttccatttcaacatggtccgggatgacattccaagagctgccgccctgaactcttgtgatgctgacgacggcattatgaagcgaactgatatttctgctgacaactgattgcaggccgccgatgatctgtcctgccgcctgaatcggatcaatgctgttatcagggattccggcgtggccgccttttcctttaacagtgatttcaaagcggtcgacactcgccatcagcggaccttctttcagaccgaccgtgccgacggggaggtcaggtttgttatgcatgccgaatatcgccgatacaccgtcaagcgcgccggcttcaatgacctgtcttgctccggcggcgatttcttccgcgggctgaaaaataaaccgcaccgttcctttcagctcatgctttctctcatttaataaaaaagccgtgccgaggatagatgccgtatggaaatcatggccgcaggcgtgcatcacgccgctgttgcgtgaagcaaacggaaggtttgttttctcttcgatcggcaatgcgtcgatgtccgctctgacggcgatgacggggccgcttttgtctcctttgatttcagcaatcactccggtttgaagtttcggcatatcaagaaccgtaattccttcttcctccagccagcggcggattttattcgtcgtttcgtattcctcgcctgacagctcagggtgttcatgaaggtcgcggcggatattgattaaacgtttgtttaatgattcatacgtttcatttgccatttcttcttcttcccttcttagacaagttcggcgggctctcccacttgcttaatgaattttttcgtccgttcgttctgcggattgtcaaacagctcttccggcgttccctgttcgatgatgcgtccgtccgccataaatatgaccttgtcggccacttcacgagcaaaagccatctcatgcgtgacgatgatcatggttgtctgtttttcggcaattgatttgatgacttggagcaccccggctacaagctcagggtcaagggccgaagtcggttcatccagtaaaatcgcgtgaggatcaacggccaaggcacgcgcaatcccgatccgctgctgctgcccgcctgacatcgtaatcgggtagctgtccgctttgtgttctaaaccgacttgccgcagcagatccataccgatctgttccgcttcttttttcggtttcttttgcgcggtgatcagcgcctctgtcacattttgcagggcggttttgtttttgaacaggttgtaattctgaaacaccatcgccgtctgctggcgaagcttatgaacgtctttgcgcgaataggacgctgcattcagctttgcatcaccgatttcaatgatgccggcatccgggcgctccagcagattcaaacaacggaggagcgttgattttcccgagcctgacgggccgatgatggccgtgacttcgccgcttttgatctcaagatcgatcccgtcaagtacggtaaggtctttaaatgcttttcgaatatgtctgacttgtatcatcctgagcctcctcctatgtgcgataaggcttgctgatcgcccgttcgagcagatcctgcagcacactgtaaataatcgtaagaatccagtacatgaccgcgacggctaaatacgtctcaaaatatttgaggttgcctgatgcgtacatttttccttgggcgaacatttccatcactcctaatgtaaaggcgagcgatgtttcttttaacaggccgataaacgtatttcccgtcgcgggaagcgcgtttctgacggcttgcgggaaaatgatccgtctgtacgcctgggattttgtcattccgacagacagacaggcttcaagctgcccctcatctactgagttgagcgccgcgcggaagatttcagccaagtaggcggcattcttcaggcttaacccgataatcgccgcagttaacgccgtcatcttgctcattccgggaaacagctgaggcaggccgtaataaattaagaaaagctggacgagcgtcggcacgccccggaaaaatgaaatatacacctttgacagctggtgaagcacaggaacacgattttttgtgataagcgctaatataaggccgccgatcacggcaaataccatggctgcgacggccattagtaatgtgatcggcaaggcttcgattaacgcgggaaaagctgaaaacataaatccccaatcaatgctgttcattctcgattttcaccgccgtttcttaatgctttgcttctgttgtgatatcttctttaaagtacttttcagacagctttttcagcgtgccgtcttttcgcaggtcttcaatggctttgtttacttttttgcggattttatcgtgagccgcatctttcgcaaacgggaaagcgactttttcatagacaatcgggtctcctgctaatttcagaggcagaccggtctttttgatctgggcgatcaggacgctgcggctgtttacataagcgtcaacccgtccgtaagccacgtctttcagcgtgccttcttgtgtttcatacgttttcatgttgatttttttatccgggtccttgctctcaaggtttttcgcgtggtttgagcccagaacggccgccactgtttttccttttagatcgttgactgatttgatgtctttgttatcgtttttgacgacgatttgagtgcccgcatacgaatacggttctgtgaagttatacgttttcttgcgttcgtccgtgacagcgacctggttagagatggtatcgagtttgccggtctggagctctcccatcagtccgctgaattcaagcagcttccagtccagtttcatgttgatttttttcgcgacggcttccatgacatccacgtcaaagccggtcagcttgccgttttctttatatgcgaacggatagctttgtcccgtggcgcctacatgcagtacgttatcgccgccttcgctttcttttccgtttccgcatgctgataagaccgccaaaagtgcggcagacagcagcaaagcccatgttttcttcttcattgaaatcccgccttttcctattaaaatgttaatcctgcaattgttttttcaaataaatggtgatgtgcccttttcctaagtccttttcgcctgcacggacgtagcctttccgctcgtacatgccgatcagccacggatgcttatccgctgtgcccagtgacacgaaaggcgcttttaatgtgtcgcggagcactgtattctccagccactccagcatgtctgagcccgtccctttttttccggtttcaggatcgacggcaaaccaccaaatatgaggaacaccgtacggcccgggattcggcccccacggcatccgcagagaaatcgtcgccagaatccggccgtcttcctccaaaacgtagcaggcgtttttttgtatgttattcaaaacgagttctttatccgccgtggcagcggcaaagttgatgccgagcttgcggatcggttcatacgcccgcagtgtcagtgaaagcagctcatcagcgtcttcctccgttgcgagccggtattgtcttgacatgatgagccctcctttagtcggcatatcggtttgccggtttttccagtccgaaatgttctctgagcgtcgttccttcatactcttttctgaacacgccccgttcttgtaaaatcggaatcactttgtctacaaaaagagtgagaccttcaggcaaaagcggcggcatgatgttgaaaccgtcacaagcttgttttccgacccattcttccatcttatcggcaagctgttccggcgttccgacaaagatatgatggcctcttgaacccgccacatatttgtacagctcgcggatggtcatgttatcgcgtttggccatctcctgaacgagcttgaagcggcttttaacggcattcgacgcatccgcatccaattcaggcagcgggccgtcaagcgggcaggcggaaagatcgacgccgcccagatagttttgcagaatgttcaggccgacagacggaatgatgaggtcttggagctcttcatattttgcctgcgcttcttcttcggtatcggcgataacgggaaaaattcccggcatgatcgcgattttttcaggatcacggccgaaagaagccgcttgttctttaatagattgatagaattcctgcgcggattccaaatgattttgcgcggtgaaaatgacctccgccgttttggcggccagcgcttttccgtctcctgatgatccggcctgaataatgaccgggcgcccttgaggtgtgcgggcgacatttaacggccctctcacggagaaatatgttcctttatggttcaattcatgcattttgtctttatcgaaaaatgctcctgattctttgtcacggataaaggcgtcttcctcccacgaatcccataatcctttgacgacttcaacgaattcttccgcgcgctgatatctgagatggtgctcaagatgcttttcgccgctgaaattaagtgcggtcgattcaatcgaagatgtaacgacattccagcccgcgcggccgttggaaagatggtcaagcgatgcaaattgtctcgcgatatggaacggttcgctgtatgtggtagacgcggtcgccgtcagaccgatgcgggatgtgacctgagcgagcgccgacagcagcgtaaacggctcaaagcgcgtcagcacattcggatgtgatttgccgtcaattgataaactgtccgccaagaacagcatgtccaatttcccccgctccgctgttttcgccagttctttgaaataatccaaattcatgctcgcgtccgccggtgcctgaggatgtctccaagaagcgacatgatggccggtgcccgcgagaaacacaccgagtttgatttcttttttctttgtcatgatggatctccttctattctgaaatacggttcggaacatattaacaccactaaacctatatttcctagtaattttataagaataaatcaaaatgtacaattgtcaggtaagtttgtcaatgcatgaagacaaaaatcatgattttttaaaaaacccggcgcaccggccgggttatttcttcgaaactgtatagacggtccctttgacctttttcttaataacggcaatgataagcagcaaaacggggaacagcacttgaaacggaagatgaatatagatcggcacaatgtttaagccttcattcatgtgttccgaaaaattgcttgcgatgctgatggagagaatcagcacccccaatccgaccgggaaggccagctgggacggatttttttctttaaacagcgtggacacgcccacgacaaccgcatatgtaaaaaggctgactttgaaaaaaccgccgatgacgagcacgagcatgaaaaagacatccagccggtctaaaaactcttccactttaattgtctgtatggtgctcagcagcggaaattgagagcggagcattaagttgacgtccagcacacaaatattaatcgccactgacattgccaaaaacagcccgctgatgataatcgccagaaatccggttttcttcacctttttccgatcttttaaataagggaaaatcatgacaaacacgattaattcaccgaacgggatgaacatcgtctgtttaaacacggaataaatgaccgttcctgcaccctccgctaaaacgggctggagaaatctgaggtttatcgtgcctgagctgataatgaggatcagcccgacggctgtcaggaaatacataatgccaaacagcagctcgccggctctcgctatcacttcaattccctttctgaccgcaaatatcgcggcgatcatcagcatggcattcacaattaaaatcggcgtgtcctggtaggcgaaggtgacaagcatttcgccgaaatcccgcaatacgcgggcggcgatataagcaaaatagagaatataaagaagggagaccgcccagctcagatgtctgccgatcagttcgttcatgtaatctctcggtgaagactcaggaaaaaattgatacagcgcctgataaacgtagaaaagtccgagaccgataacgcacccgagaagcacggacagccacgcatcccgcccggccatcgtgcccggcgggatcaataacgaactgcccaattcaaacaaaatgatcataataaacagctgacgcgtgccgattttcgcattttccatacgcttcgctcctttctcctcaaatcaatcatgctcaagcttgtctgagagaggattattccgcaagcccgttcttctgataatgacttccgttttgacatctacggggagattggggaaatattcttcatcccacttccctttgaactttttccatttgtccggatgcttccgatagatcaggtctccgaagccgacgaagtcattcttatgggcttttatatcttcaatcgatttggtgatatctttctcaagctgcacgctgagcgccttttgcatcgtcatcagcacttgcggatcagacagatggaaagggtatctgacagcgtccaccagcccctcgacctgagcatgcacgtgaatatgcggttttccgttcggaaaagtggccgtcacttttgtattctggcgggtgacctgcagactgattgcatgcttcacgttcttccaatccgcattgatgaacgtatgcttgatcctattgagcagccatacagcccccacactgtcgtcatcctcaatccagtaatccagcctcccatcctttttgaacaccgccagtccgtccgctgacagcactgctttcggttcagttgtctgcgtattttccatcgtaggaccggctttatcgtctccgtgcatttcataacccggaataaacggcgacccggccggagaagcgagatcaatcagaacgtcctgaaggctggttttaatgactctgccgtattgttcctgcgtgaagctgagcgtcttgttcactttattggaagggattttatcaatcggcgtcagcactttaataatgtcttcagccttgcaattatgcgcgatcacaacagttgcggtcgtcctgaattcggtgtcgcggtcaagattgtccagaataaaactgagcccttcctctttcgccagtttttcactgaacaccacgagattcgtatgcgcaaaatagagccttctggacactttcatcgagccttttctcaaagcttccgtcatattgtctccggacaccgaatagacggaaaccggaggccggtctcccgctccgccgccctgcagaccgccggccacgtttcccggattgataatttgcaagtgaaggacgtattttcccgtttcggtccggtcaataccgatggcggagatcaccgctagatcggtcagctcccttttatcccagcatccggatacaaacataagggaaaccatcgtacaaaggataagcatccatttacgtcttttcattaccgtcgccctcttctacatctttattaaccattcctctggatgtctccggtttcggtctttgatgttccccttggcgcctgttgttttcctgcacgagcagtcccggccttttttcatccgcccataacggagctcggagaagggaatccttcagcccgcccggggttaaaggagcgagcggggacatatacggaaatccgaatgaacgcaggccgcacagatggacaaacatcatgataatgcccagaatcagcccgtaaaatcccatgaccgccgccgacagaataaagagaaaccggatcaggcgcgcagatatcgccatgtcaaaagccggggtcgcaaagctggcaatcgccgtcagggcgacgacgataaccatggccggggagacgatgccggcctgtacggcggcctggccgatgacaagcgctccgactatggaaacggcggagccgacaactctcggaagccggacacccgcctccctgagaatctcaaaggccacttccatcgtcagcgcttcaatcacggccgggaacggcaccgtctcccgctgagccgcgatgacaatcagcagctgcgtcggaatcatttcctggtgaaaggtcgtcgccgccacataaatccccggcgccaccagtgaaatgaagaagatcaaaacccgcagcaccctgatgctggtggcgatatcaaatcgtgaataataatcctcaacggattgaaaaaattgaataaataaggccggcgcgatgagaacgaacggcgttccgtccacgataatcgcaaatcgtccttccagcagattccccgccacgacgtccggccgctccgtatgatatacggtgggaaacacagaaaacggcgcgtcttcaatgagctgttcaatgtagccggattccagaatgctgtcgatgtcaatgtgcttcagccgcttgcggacttccttaatcagctttttatcgcaaattccgttaatatacatcagcgcgacatccgtattcgtttcgtgtccgatctccattttttcaacccatacatcaggcgtttttacatacctgcggatcatggatatattggtttgcagagattcagtgaatccctgccgcgggccgcggaaagagacctgagtgctcggttcttgaatggaccggtgctctcccccttccgtgctggcgatcagcgccttgtcagccccgtcgacaaaaatgagcgtgctgcccgccaccagcccggcataaagacttttccatttttcttcctctttcaccccgccgatcgcaagcgttttatcgtatatcaggcagaccgcttgttccggctgaacggacgggatgtcgattaaatcctccagaagggattggctgacgagctgttcgtctaccaaaccggcgatatacacaattgcagccggaagctcttcttttccgattttcagccggcggatgacgacatcggcactgttgccgaacctctcagacagcttcttcatattttgctttaagctgagggagatcggctcatcccgctctttgtccggctggctgtccgcttcttttctgtcttcattgtcacggtcgttttgatcggcttttttttgtttcttctgtttaaaaaatggcggcatatcgcaaaaaacctttcctcgtttttttcatattcttcctgtacggcaaaagattatgcacggcggaaagtctgtataagttctgcggaatcgaaaaggataaaaagggagagtgatgcgcatgaaaatattgggggtttcattttttttgctggctgcctgtctgatcatttcagtaacgatagatatgctgcaaggtttcagtttctatggagcggtccaaaacaacctgtccgcttttaaattgaccaccttctcagaatggctgatgctgtttttattcgccctctttttaatcagagaaatgatcgttttatataaatcaggtaaaaaagatgcctgacaggcgcacggctgtattgtgtcaaaaaagaacacatccctccctctttcggagttcatgtgttctttttatttttccggcgggaccgttttcagatgacgatatttccgctgtccgtatctgtcgcgtgtttcacaattgcgcctttgataatgcggttgccgatgattttagtacttgcggaggaattggtttggatggcggaagcagaagcggcggaaaggttgttgatggtattgcccgacacgagggaattggaggctccgttcagatagatgccgatcgggctgcccgccgttcggttgatcgtgagcgtattgtctatgacttcatgcgtgcctgaattcagatacacggtaacgatgagcggtgatgattcaaaacggttgctgatgacagaggttcccgaggatgttgaactgaaaatgggatagtttttgtagcttttgaagagatttcccttgatgacagccctggcgtcatttgtcacagatacggcataggactccgcggcgccctgatacgcattcggaatcagcgtatttccttcaataacggcatttccgcctgttacccatatgccccggctgaacgatttcagcacattttgttttacggtgatattgccggccgacatgctgattccgtccgttacctgattcagagtattattcataaagacggcgttttccgacagcgtcgcccgcatccccgtgcttcgtctcgtttcggaacgtccgttttcaatgacattgccgtcaacggtcacatcttccgcttgatagacggaaatgcccgtattttcaaattgactgattttgttatgggtgacgaggacgctttttccccttacatctattccggtggaaaaaccggtaatcagattgttggaaatgacggcattgctgctgtcctgcccctgtgacacaccttgtccggcgactgcggttcttgagccgccatctgaccgaaagaagacattccccgaaatgacggtatgtgccccatacccgtagctgattgtgttatcggaatgatttccttcaattaacacatgatatccgttaaaattggtgactgagcttgctgcgtttccggaaaagaagttgttgcgtaccgtaatatgaagagcttcttcataatcaatatcgccttctccgtacgattcaatatcgattccgaatttcggagccgttccgttcccttgcccggcgtcttcaatcacgcattcttccaccgtaacggtattgcagccggtgattgaaatgttgtttcgccttgactgcctgatctcacagcggcggatggtcacctgttctgaagtttcgtaatcactgtttgtttttaacccgagcgggctgacaataatgccgtctcccgtaaaatccgaaatcttcacattttcgatcagcacattgctgctgccttcaatacagattccaaacccccattcatgggtcgaacgcaaagggacattggtatacgtgtgttcatcccgttcgccgatgatccggccgccggtgatggtgacattttcccgcctgcctatatagaaagccgagtagccccaagagctgttcggcgccactttaatcgtgcattccggatctaaaacgatggtgagatggctcggcacgttaatcccggcgttccgaaacggctggctgctgtccccgccaagcgtgccgttgattttatacgttcccggcggaaaaaacaccgtatgacagccttcgctgacggccttggccaagcattggttgatggcgcccgttacatcggtttttccgtctgccgccacaccgcaatccgtaatatccaatatacgattcggcaagtgataatctcctccttcctctcttattgtcatcttattccgccatatcccgctccgcctgtacatactttaaattttattaaaaaagtttataaagatagtttagtcagataatataacaaaataagtcattggaattaggaaaattcgtctatattcaacgttttaatatcttttcattctggaattttttgaattcagtataaattatattgacacaagtattatataagaatatgatttttgtaatacacttttttaagaaagggttggctcaggtggcatctattgataaggactctataacagaaactgtgccgcaacgaggctttttcggtcatccccgcggcttgttcacactgtttttcaccgaattttgggagcgtttctcctactatggtatgagagccatattgctttactatttatacacggaagtcgctcatggcggtctcggctttgataaaacgaccgcagttgccatcatgtccatatacgggtctctcgtatacatgtcgagcgtcatcggcggatggctggccgaccgggtattcggcacggcaaacaccgtattttacggcggaattttaattatgttcgggcacatcgctcttgccttccctggcagcacggcggcgttttttaccagcatggctctgatcattatcggaaccggcctgcttaaaccaaacgtatccagcgttgtcggagatttatatacgaaggaagacgagcgccgcgactcaggtttcagcatcttttacatggggatcaacctcggcggattgcttgcgccgctaattgtcggaacactcggacagaagtacaactaccacttaggcttcggatgcgccgcggccggtatgttcctcggactgattgttttcgctcttacgagaaagaaatacctcggcaaagcaggctccaatgtaccgaatccgatttctaaatcatcagtgatcggcacgggaatcggagtggtcatcgcagcagccgttatcatcgttctgattcaaaccggctggctgacgatccagcgtgtgattgatacggtcagtatcctcggtattgtcattccggttatttactttatcgtgatgttcacgagcaaaaaagcgacgaaaacggaaaaatcaaggcttgcggcttatgttccgctgtttgttgcagcggcaatgttctgggcgattcaggagcagggcgcgacgattcttgctttatatgcggatcagcgcacgagactttcctttgcgggcatgcatcttgagtcttcatggttccagtctctgaacccattattcatcgttattttcgcgccggtgttcgcctggatctggatgaagctcggcaaacgcctgccttcaacaccgattaaattcgcgatcggcattatccttgccggattatcatttttagtcatggtgcttccggttatgggcgggagcggcgagcttgtgagcccgctttggcttgtgctcagcttccttttggttgtgcttggtgagctttgcctttcaccggtcggtttatccgtcacaacgaaacttgcgcctgccgctttctcagcgcagacgatgagcatgtggtttttaacaaacgcctgcggtcaagccctgaacgcaaaagtagtcggtttgtttgataagatttctgaagcggcctacttcggctcaatcggtcttgtttcaatcattctcggtattattttgattcttctgtctcccgttattaaacgggcgatgaaaggcgtacaataacagataaagaaaagcctgcggaatcgtccgcaggcttttttgatgcgtctatcgttttaactcctcaagcgtttctctccatctcttcaagacatcttccggttcgtggagctggatggccggtccggatgtcagatccgcgtatttcgcccgatcttccttgacggtgatcacccggcagctgaaccgttcccgctcgtgtttcgcctctttcagcggcggaagcgcctcacattccaatgtgacgtaatatgcggctcctccgtgccaggcgatgaaaagagcttgtcccgaatgcagaaggcttcttacggtcgtcgtgtttttccataaggcaagccggagatttgttctgctcacggccacgatttcaccggcgctgatcatggccgcgtgcggacggccttcttttgtcacggattggagtacaaatgcgtcgtgctgctttttttcaagctccgtcccgtctaaaagcgtgtaaagcgcctccggcaagtgctccgtcagcattacgcttttctttccggaacagcgggaacatgtgcggccgtctccgtttctttcggatcgattttaaatgccgggttgaatgccgccggattcgtgatgctttccggttcacaggatctccatgtgaaaaagcaggtttggcattggtaaatttcccaggcacctttgaccggcgattggctgacggtttctccttttttcgattcacagcgcgggcatgttttcattgcaacctcatcctttcttattgattcattaagtccatcagtttttgttcccattctttcgttgtcagcggagaatcaagcggctgcgaataatggcctcttgtttccggcgcgacaggcgtcgtggcgtcaagaatcattttgtgtgtcatccctgccggatcagaccccgggtcaagcggaaggacagacaggtcaggaatgatgactgcatcgtgtttcggatgcattttcgttgagagcgcccacatgacttgcggcaggttaaacggatcgacatcctcatccacgacaatgaccattttgcagtagccgagtccgtgcggcgtggtcagggcgcgcatgccgaccgccttggcaaatccgccgtagcgcgttttcgttgaaatgatggcgatcaggccgtgcgtatacatcgcgttcacggcgacaatctcgttcggataagcttccttgagctgctggtaaagcggcacgcacgtattaatgccgatcatataatcgcactccgtccacggcatgcctaagtataaatgttcaaaaatcggattgtttctatgatatacccgtttgattttgatcaccggcatgctgcggccgcctgaataatggcccgtgaactcaccgaaaggtccttcgtattcccgttctcccgcaaggatctctccttccagaacgacttcagcgccccaagggatgtctaaatcagacaatttagatttgacgattctgtagggctccccttgaatcgcgccggccatttcatactcggattgatcgtataacagcggagttgacgcagctgtcgtaatcaccggctcacagcccagcgcgatcgtaacgggaagattcacgccgcgttcttcagcttggcgaagatgaatcgcaatatcatgctgaggcacgggctgaatgccgaggcggtcttttccctttacctgcattctgtaaatgccgacattctgcttgccgaaattgtccggatcttcaagatcgcgggaaatgacacacgctttatccaaatagtagccgccgtccccctggttgattctgaatagcggaaggatgtcaaatagattgatatcttccgttatttcattttcatgaaacggcgcggtttcttcccgtttgaccggcatcggaaatgcatcgtaccgtttggcaaactcaaagaattgttcctttacaggcgtatctttcggcatgccgagcatcatcgcgtgattcggccacgagccgatgacattcagagccacctgcgcatggtgatgtccgtaaatattgttaaacaaaagcgcaggggttttatccccgagattgctggctgcacgcgcagcggcacccagatccggctccggtttaacctcttcgttgactgttaagagctgcccttctttttcaagagcggcgagaaattccctaaaatcctgataggccattatcagattcctcctttttgtttttcaattccgtaccaccgtttcgcttccggcagacggatgccgaactgatcgagcgtccggaacacaatatggtcgatcaattcatccatgtcagccggcttgttataaaatgcaggcatcggcggaagaatgacggaacccatttttgtaagcgctagcatattttctaaatggatttggctgagcggcgtttctcttgtcagcagcacaagttttttccgctccttcaggatgacgtcagccgcccttgtcagcagattgtcagccattccggtgcggatgcttgccagtgatttcatgctgcacggagcgatgatcatcccgtccgtttcaaacgaaccgcttgaaatcgccgctgcctggtctttgtgagaatacgtataggatgcgagtttctcgacatcttttaacgtataatcggtttcatgtgtaatggtgacatttgcccaaggagacacgacaagatgggtttcgatctccgcggcttttaaatattctaaaagcctgatcccgaatatggctcccgttgccccggtcattccgatgacgagcttcatatcgacccctcctttacgcttgaaatgtggtgtcaaaaccatcatactcctgatatatccatatgaaaaatattcgttaaatctatgtatcataccttaaaggtataacagaaaggggcgcgttctcatggatatccggcaattgcgttatttcatcaccattgcccaagagcagaaaatcacgacggccgccaaaaagcttcatatggcacagccgcctttaagcagacagctgaaacagctcgaagaagaattgggcgtcattctgtttgaccgcaataaaaagaaacacatgacccttacatatgaaggaaatgtctttttgaaaagagcgaaagagattcttcataagtttgaggacgctataatcgaggtacaagagctgaaggaggaggtggccgggacacttgccgtcgggtcaaccatttactgcgccgcgctcatgcttgagaaagtgtcacagatgaaagagcggtttccgcatctcacctttaacatttgggaagatgagcctgtctcactgctcgagcttctggaaacccggcagattgacgccgccgtcaccaccaccttgattaaaaacgacggcattgaatcgaaggagcttgaagacattccgtgtgtattggtgctgtccgagcattcaaaacgactgtgcggtgaaacgattaaactgaatgacatcgcctctttgcctttgatccttttgcgcaccgtcaatggaagaggtgtgtatgaccaagtcctccaagtttgtgaacagtacggtctcgaccttcaggttgtctgtgaatgccatgactccgcgacgctcttgagcctcgtatcatcagggttcggcgccacaattctgcctttgacgatgattcccgtccatatgcgctcgcatgtcaaaacggttatcatcgaagacaacccgtttgtcatgacaccggccgtcatctggaggaaagacagctatctgccgaagccggtcagacagtttttggaattattttgatccggaccacgaagaattcccgcttatgaaaaccaattacttgactcatactaaaaaaaagttatcctttacaattgggagctattttttctcaataaaactactcagaaaagtggggaataaagaagatgaaaaaagcattattcgctttgttcatgatggtcagcatcgcaatgcttgcagcctgcggaaactcacaggatagcggatctaagtcaaaagacggcgatctttgggcttctgtcaagaaaaaaggcgtactgaccgtcggcacagaaggaacgtacgaaccgtttaccttccatgataaaaagagtgacaaactgaccggatatgatgttgaagtgattcaagaagtcgcgaaacgcctcgatctgaaagctgacttcaaagaaacgcaatgggacagcatgtttgccggattaaacgcgaaacggtttgacgtcgtcgccaaccaagtcggcaaaacaggccgtgagaaccaatatgatttttcggataaatacacaacgtcaaatgcagtcgtcgtgacgaaaaaagacagcacgattgcgaaagaggctgatgtcaaaggaaaaacagcggctcagtcattaacaagcaattacaataaattagcgaaagaagccggcgcgaaaattgaaggcgttgaaggcatggcgcaatcccttcagctcattcagcagggccgcgctgatctgacttacaatgataagcttgccgtactgaactacttaaaaacgtccggcaataaaaacgtgaaaatcgcgtttgaagcaggccagccgcagcagacgtatttcgcattccgaaaaggaagcggcgaacttgtgactcacgtcaacaaggcgttaaaagaaatgaaagaggacgggactctttctaaaatagcgaaaaaatggttcggcgaagatgtttctaagtaacatgccggaacccgtgattgcaacagccattccttgggatttggtgcagcagtcattctggccgattctttccaggggaatctattattcgattccccttgccattctttcctttattttcggaatgatcatcgcgctgattacggcgctcgccagaatgtcaaatatgaaaccattgagatgggtgttcagcgtatacgtatcagcggtgcgcggcactcctcttctcgttcaattgttcatcattttttatctgttcccgacatttaatattacgctggaccctttcccaagcgcagtcatcgcgttttcattaaacgtgggcgcctacgcttctgaaatcatccgggcatctatttcatccgtgccgaaagggcaatgggaagccggttatacgatcggcatgacctatcgcaagacattgttccgcgtgatcctgccgcaggcgtttcgcgtgtccattccgccattatcaaatacatttatcagcctgatcaaggatacatctctcgcgtcacagattctcgtcgcggagctgttcagaaaagcgcaggaaatcggcgcgcaaaaccttgatcaaatcttggtcatctatattgaagccgcctttatttattggatcatctgcttcttgctgtcaatcgtacagcacgtgatcgaacggcgtctcgaccgttatgtggccaaataaggaggtttcgatatgctttccgtcaaaggattaaataaatcattcggacagaatgaaattttaaaaaagatagatatggagatagaaaaagggaaagtcatcgccgttctggggccgtccggttcaggaaaaacgacgcttctgcgctgtctgaacgcgcttgagatccccaatcgcggcgagctggcattctccgatttttcaatagatttctcaaaaaaagtgaagcaggctgatattcttcgcctccgccgcaaatcaggcatggtctttcaggcgtatcatctgtttcctcaccgcacggcgcttgaaaacgtcatggaaggacccattcaagtgcaaaagcgcgacaaggagcaagtcagaaaagaagcgatggagcttctggaaaaagtcggactgaaagacaaaatggatttatatccgttccagctttccggcggtcagcagcagcgtgtcggcatcgcccgcgcgcttgcgattcagcccgagctgatgctgtttgacgaaccgacgtcagcgcttgatccggagctggtcggcgaggtgctcaaagtgattaaggatttggcgaacgagggctggacgatggtcgtcgtcacccatgaaatcaaattcgcgcaagaagtggccgatgaagtcatcttcattgacggcggcgtcattgtggaacaaggaccgccggagcaaattttctccgcgccgaaagaagaacgcacgcagcggtttttaaatcgtatactgaatcctttgtaggagcgggagaagaagcgaaacactgatttcgcttcttcttttttttggcggttatgctacaatgacaattaatgagattttatgaaagaagggacctctttgaagcgggaattcttgatgcgctggacgttttattttgccggtctgttaattttgtctttcggggtatcgttaaccattaaaggaaaagctctcggcatcagcccttgggatgcctttcattatgggctttttcagcatttcgggctttctgtcggccaatggtccatcgtagtcggcgcggtcatcgtggctttaacctgcctgttcacaaggacactcccgaaaatcggcgctatcttaaacatggtgctgatgggaatgtttattgatttcttttcgtttctgcttcctgagacgcacgctttttccttagcggccgtgtgtttttctatcggattgctgctgatcggctgcggcgtcggtatttacgtatcagcagggctcggcgcgggcccccgggactctctgatgatgctgatatctgaaaaaacaggctggaacgtgcaatgggtgcggaacggcattgagctgacgattcttgccgcagcctggatgatgggcggaccgatcggcgccggaaccattattacggctgttttgacggggctgattctgcgtttttccttgccgcagtcctctaaactgttaacatacgcgatctccgggcgggcaacgtccgttcattaaaaacaaagccgaaacggttttgtttttttattttcggacagctttcgtctgatatgataggatggttttgacaatattttcagacggaggatctggacatgaagatttacggagtatatatggaccgcccgctttctgcaggggaagaggatcggatgatggcggccgtgtccgccgaaaagcgggaaaaatgccggcgcttttaccataaggaggatgctcaccgcaccttgatcggcgacatgctgatccgcaccgctgcggcgaaggcttacggacttgatccggccgggatttcattcggcgtccaggaatacggaaagccgtacatccccgcgcttccggacatgcactttaacatttcccactccgggcgctggatcgtgtgcgccgttgattcaaaaccgatcggcattgatattgaaaaaatgaagcccggcacgattgatatcgccaaacggtttttttcgccgacggaatacagtgatctgcaagcgaaacaccccgatcagcagaccgattatttttaccatctgtggtcgatgaaagaaagctttatcaagcaggccggaaaagggctttccctgccgcttgattcattcagcgtccgccttaaagacgacggccatgtgtccattgagctcccggacggacatgaaccttgtttcatccgcacatatgatgcggacgaggagtataagctggccgtttgtgcggcgcatcccgatttttgtgacgggattgagatgaaaacgtatgaaaagctgctgtaagcatagaaaaaggagggtgtccccctccttttttgtcagcctgatatttccgcctgtttctgcagctgctttgcttcctgataaatttcttcgaacagatccgcgatgtgttcctcttcaacacatgaaaatgcgattcgcaaatcggtttcattaatggatatcgtcccgattcctctcttttcaagcaacgacactctcaattcgccggcgtttatgtctttcagccggacacacatgaaataaccagagttaaacgggtaaggcgtccatacgtcatcatagtgcttgttttctgcaagaacggctttcactttgtcggcccgttttttcatgatgttatatttcagcgatttttctttctcgtattccggtgactgcatcgcccgcagcataaacgtttgggacgggtgcggggcgcttgaaatcgttcccctgataatcccttttgttttttcctcgagcacgcgcagcgctttttcgctttttgtgctgtacgtaataaaaccgacgcggaagccccacgcgtaattttccttcgtcgcgccgtctattttcacgcaaagcacccggtcgtgcacttgggcgagtttgctgaagatggattcctgaatggacgtttcatcgtaaaacagattgtaatacgcatcgtctacgagtacgacaatctctttgccggcttctgccgcctccaggatcacgctgacgatttctgccgcttcctcttcccccggcgtgtagcctgtcggattattcgggaaattcagcacgacaatcgccttttcttcctgctttttcagcagctcggacagccccgccgcattaaaacgcccatcctgctgaaaaagcgggtacgtctcaatggatgccttgcgccggacaccgaaaatgaaattgtaatttccccaatatttatcaggcagaagcagtgtatccccttcattgacgaacaagtcggcggcgatgctcagcccgtgtgttaaagcgtttgtcacgatcggcgtgctgatgtctttgccggctaatgaaggattttcgagacgcatttttttcagccattcctgtctgagcggctcttttccctgcggcggagcataatcgtagatatcatcggggttataggcggacagtgtctcttgaatatgggaaaagtgcatcgactcgccctgtgaggtggcgattccgatcgtggcattatactttccggccttggctttcgcttccgccgattgtgtcagcacccctttcggataaaacaactctctgcccaaatcagaaagcatatgaagcacgtgcgggttttcttcagataatgttctgttcagctcttttgctgcatcattcatgtacgacaatcccttcaaaattatattccatcaaatcataacataaaatttttgataaatgagaaaactcacgggcagattttgttacaaaaaacagacagcgaatgctgtctgtcatatcctataacaattggcctgcagtgctcctgttaataatctcatagattcgttccgccactttttcagtttcacttaatatgaacatgtggccgtccgaaaactcatgaaatacgggattgtcggcccattttttccatccgtccgcatctttgatacattttttatctttccgcccgttaaaaatatggacgggtgattgaatcatgtgagaatcagacggacggaagctttcaagcgcgcggtagtcggatctgaaagaaggcaggaaaaatgacatgacctccttattctccactaactcctgcggcattccgccaagctcgataatatgggcgagaaatttttcatcatcaagatgagacacttttttcctttcaacatgcggcggctgaatggctgagatgatcacggcctgcgggtaaatgccctcccgctccagcttttgcgccagcctgaaagcgaccatgcctcccatactgtggccgaacagcacaaacgggcggtcaggatggagattcaactcctgcttgtataaactgacaagctgttcaaaatcctcaacgggggacatttgatttgttccgtgtcccggcggttccgcggcaagcatctcacactcaccttgaagataggtgtggagcgggcggaatgatgcggaatagcctcctgcgaacggaaaacagataagctgcgttttttccgtggtatcgaacgatttaaagagctggaccattggcgggcttcctccttttctatcgtgaagctgtcagcttcggatgttccttccttaggaattcgagcaaatatgccgcattcctttcgagacattctccctgaagcatttctgcatgactgccgcagccttttttcacacggtattcacctgtcgtggcttcctcccacgaagcgagccacggcggcatcgcaaagtccggttctgacgttaatagatctatatccgcattgaccgtgccggtgctgacggtatgcacgaaataagaataaaacgcgtttgtttttttggcgagaccttctttgacggcttcgtcattcagcgcttcgttatcccggtttaccttcatcagcgcctggacatcgctttctacggtgcggccttccaagtcgctgacgccttgttttttataagaatcaaccatgatcagccgctccactttacgtccttcggcttcaagccgtttggccgtttcaaaggcgagcgtgcagcctgccgagtatccgaacagcttgaccggtccttccggctggagctgattgatcagctctgtgtagcgttcaatgcgattgtcttcctcgataaaatcaaacgcacagattcgaaagccggacagctgttttgccagcggctggtacatcagcccgtaaccgagaaccggcgggaacgcaaacagtgtgtcagactgatttttattcatgatggtgagatctttcattcctttttcttcaccgtgaagcagataaccggcaatgtctgcgattgtcgtcgcttcgaataacagctgcaccggaatgtcagtaccgagctcttttttaatgcgcgacgctgccgtcatcgcttttaaggagtggcctccgagcgcgaagaaatcatcatgaatcccgatctgctgtctgccgagaatctcggaccagatgtgtgcaatcgtttcttccgtcgcgtttcgaggcccgatccattctttcgctgcctgagcctgatccggtttcggcagctgccgtttattgaccttcccgtttgtcgttaacggaagctcctctaagaaagtaaaggtttgcggcaccatgtaagcaggaagctgttttttcaggtgcctctttacgtcttcagctgaaagcggcgtccggttcacgaggtaggcgttgattgatgcatctccagactcatggcggtccgcaacaacgaccgcatctttcacacccgggtattcctgcagctgcttttcaatttcttcaagctcaatccggtgtccgcgtattttgacctggtcgtcaatacgcccagcgtattcaattgttccatccggcagccagcgtgctaaatcccctgtgcggtaaagcgtttctcccggcttgaacggatttgggataaacgtttgcttcgtcaggtcatgacggttcagatatccttttgatacacccattccgctgatgcacagttcaccaacagctccgaacggctgaagctgattttgcccgttaagaatataaacactggcattgctgatcggctttccaatcggcaatgaggaaatggaatccggtatgtcgtgcacgacgtgagctgtcgcaaacaccgttccctcagtcggcccgtagcaattaatcagcttgccgggccccatgatctcaagcgcctttctgacgtgaggcactgacgcgcgctcacccccgaataacacacagcgaagccccttcagccactcctctcccgcatcggtgagaagattaaaaagtgcggttgtcgcaaacatgacattgacattctcctgccggatcagatcagtgagccgttctgtatcaagcagtgtatgttcatctgcgataatgagccgtgccgcattcagtattgatgagtagaaatcaaaggtaaatgcgtcaaaggcgtaattggaaacagataagaacgtatcttgttcagaaaatgccatgtagtctacatgcttgaccaatccttgaatattggcatgagtggtgatattgccctttggctttccggttgtgccggacgtatacataatatacgccggatcatcgggatcaattgcggctgcaggatcgcttgcctgttcctcaaaccgtgcccgatcatcgatgatgagtgttgttcctgtatacggcagctgagccgctttttctttcatctcctgatgtgtcagcagacaggctgccgcactgtcagccagcatgtacgagattcggtcctccggcagcttcggatcaaccggcagataagccgctcccgcttttaatacgccgagaatgccgatcaccagctcaagcgagcgcttcgtgtataacgcgacaacggtgtccttacccgcgccttgcttttgcaaacggcgcgcaagacggttcgcttcctcatctaattcacgataggaaagagtctggccggaatacgtaagcgccggtgcatctggatttacattcaccgcttccttgaaccaatctgtcagaggcttcgcctgatgagtctgagccggcgggtttaagccggtaagcagaagctctctttccttttcatcaacaagtctgatcgtattgacaggctgatccggcttctggatgagctgctgaatcgctgtgagaagctgagattttaagcgcaggataaacgcctcatcaaacacattcccgttataggcaagcttaatcagcatctcatcacctggagaagccatcaggttgagatcataattcgatttctcaaaaacatggacgtcctccatatcaaagccgttttcactgttttcttcattttttgcatcctgaagcggataattttcaaacacaatgatgtggtcaatcagctttggctgatcggcctggctttggatgtcatagagcggcacatattgatgcggctcagactgcagcgattgctcctgcagctgcttgagcaagccgttaaatgtggtatcctcagacagcttcacccgcctcgggacagcattgataaacagcccgaccatatgttcaacgcctttgatttctgcgggacgcccggaaacgactgtgccgaagatcaaatcgccggactgctggtagcggctgattaatacactccaaaccgcctgaagcgccgtactcaaagtggtatgctgcgattttgcaagctcggtaaatgcttttgtttccgcctccggcagtgagaagagcagctctttcggctcatagccgtccttttgtttctttctttgctccgcaaatgtcgtttgtccttcaaaatcttctaagtacccgcgccagtaatgcagtgatgcttgtttatcctgcttttcaagccacttgatatagtctttatacggtttgaccggcggcaggctgtacggcttttgttcgcgcagggcattgtataccttaaacagatcctgcacgacgatgccgaagcaccagccgtccaaaatgatgtggtggtagctccacacccattcaaagctttcttccgattttttgaaaatggctgcccgcatcggaatatcccgcgtcaaatcaaagcccttgatcttatcctgttctttgtattcattgattttggctgtttgctcgctgtccgttacatgtgtcagatcgatttcttctatctgaaactgccgttttttcaatacgacttggaccggcctttttactttttcgtgaatgaacacggtacgaaatacatcgtaccggtccatgatcacattcatgctttcttcgaggcatttgatattcaagctgccttttactttcattgtcatttgttcgatgtaaaaactttggccgggattcaggagagtatgaaacagcattccctcctgcatcggcgacaaataatacatgtcctgaacttgatcttttttgaactggctcatctgctccgctccccccttctgttatctgtttttgtcacgttaaattctcctcaagcatgtcaaagatgtctcccatttcatccatctcaagatcctgcgcgctgaaatcgctcggcgtaaattctttctcctctttggccgtgcaatggccgatgatcattaagagattgtctttaaaccgctgcatctgtgtttcgacggtgcttctttcatattcttcctgattgtatgagcaggaaatgacgaagcggccgcctgtaaccatcccgctgaagctcagtgcgtataacgcctctgactcttcgctgacttgacgtcccatatcatatggagacggctcaaaccattccgttttcacttcattgtcaaactgccctaagtagttaaaactgatttcaggcgtgacgcctttttctgcttcatcggatgacagataccggagaatcccgtatcctacacctttatcaggaacgcgccgcaccgtctcttttaccgttttaatgacggaagagacgccgtcttccttgctgatctgcagaatcaaaggatattgggccgtaaaccagccgaccgtccgtgaaatattgacattcggtatgatttcttcccggccgtgtccttctaagttgatgccgactttgccgttttccgtccattcaccgatcgttaagccgagcgcgctgagcagaatgtcgttgatttccgttccgtacggatgatgaacatctgtgagcagctgtgccgtttcttcctcagtcaattcacatttcacggccgccgtatgtttgacgagccgcttgttcggatcatggtctttcggcagcggccggagttcttccgcatctgcctgcgcccaataatccgtctgctttttcagctcttctgattgcgcaaacgtgttcagcgcctccgcccaatctttaaaggagtgggttttttgcgggaggacgatgctgttttgctgctgcgcctgtttataacctgaagcgaaatcctcaagcagaattctccatgaaaccccgtccacgacgagatggtgaatcgcgattaacagatgatcgccttgttctgtccggtattgctccgcttttaacagcgggccgttctccagatcaagactgccctgaagatgatcggcaagccgctgaatctggcttttcagcatatcctcgtcagttccgtacagatcaacgatttcaaagcttgccttgcattctgtgacagggaggtatgtctgaatgatgccttccctttcttcacggtaaaccatgcggagcgcgtcatggtgttcaatcaatgcttgcagggttttttccaccaggtccggatcaaagccgtctttcgcgtgaagcatgacggattggttccagtggtgtttgtccgtgaagtttttctcaaagaaccagcgctggatcggcgttaaggccgcttcgccttcgacagggccctggtcggcctgcttgccttccgtccgctccacataagagacgagctcttcgatggtcggatgctggaagagatctttcatctccagcttgtagccgtgctggttcaggcggctcgccatttggatgcctttgatcgagtccccgccgagtgtgaagaaattatcgcttacgccgatctggtcaagaccgagcacttcctgccaaatgtcggaaagcagcgtctccatctccgtttccggcgctttgtacgcggcgcttcccgcttcaatgtcaggcgccggcagggcttttttgtcaatctttccgttcgcggtgaccggcagctcgtccatctccacccagaaagccggcaccatgtagtcaggcagcgtgtctttcagcgcggctttgagcgcttcaatatcgtcctgctgaggcgcgacataggcgcaaagcgcggtattgcccgctttgtcttccacggccgtcaccgctgcgtcatgaacgtccgcaagctgggcgaggcggacttcgatttctgaaagctcgatccggtagccccgcactttgacctgctggtcgatacgsccgatgtattcgatgccgcactgcgcgttccatttgacgaggtcgccggtccggtacatgcgctcgccrggcacgaacggatckgcggtaaaccgcttcgccgtttcttcttcacggttcaggtatccgcgcgccagaccgcggccggccacrcacaattcaccggcaatgccttccggctgcacctgatcgccgtcgccgagaatataaactctcgtattggcaatcgcccgtccgatcgaaagcgatccttcctccggattgatgacgccgcttgtcgcgacgacggtgttttccgtcgggccgtagttgttgaygatcgtgtacggctgtttcaccgcccgcttcagcttgtcgccgccgacgagaagcatgcggagggaggtattttccagctccataaattgttcggccagctgcgtcggcaggaaggtgatggtcacgccgtgctcttcgaaatagtgatttaagcgggtgatatccagccggatcgcttcgtcaatgacgtgaagctccgcgccgatggtccatgtcgggaacatytcccagatrgaggcgtcaaaaccgaagcccgcgtatttggcgcttttatcatccgccgtcatggcgaatgcgtcgtgatgccagaagcacaggttcaccagcgcatggtgytcgaccatgacacccttcggctgtccggtcgttcctgacgtgtaaatcatataagcgagatgatccgccgttgtttccgcctgcgggttcgcttcatcgttttcatcaagcggcaggctcaaaatggagcggctgccgtcaagcaggatcgtttctccgttgtagctgtccggcacgcccagcgcttcctgtgtgagaagaagcttggcgccgctgtcctgcagaatgtagctgatccgctcttccgggtattcggggtcaatcggcacaaatgccgcgcccgctttcaggacgccgagtacgcccgcggccatttccaaggacggtttcgtcaaaatgccgacacgttcgtcagccgtgacgccgcagtccatgagaatgcgcgcgatscggttcgcccttgcgttcagctcgccgtacgtccatttcgcgccgttrtatgccgcggccggccggttcgcgtagcgggcggccgtttcttcaaagagacggtgaaccgttttgtcccgcggcacagaaattgtttttcctttccatgcgtcaaggagggcttgtttttcagcatcgctgatcagtgagatctcaggcagctttctgtccggactttctgccgcttgcttcagaatccgcaggaacccggcgctccacttttcaattgtttcttttttaaacagatcagtcgcatattcaaactgaaggccgagaccttcttgatccgtaaagccgccgagtgtcagatcgaatttcgccgtgccttggtttgactcatacggagtgatgcgcaggttctccagttccagtgtttctttatccggatcttctgtcgtcaccatcacctggaacaatgggttacggctcatatctctcggcaggtcaagctttccgatcagatcttcaaacggataatcctgatgcgccagcgcgtcgagattggtttgtttcacccgttcgagcaacccggcaaaggtctgctcttttcgcgtttcattgcgaagcgcaagcgtattgacaaacatccccggcatttcctgaacttcagcgctcgttcttccggcggtcaccgagccgataatgatatcgcgctgccccgtgattttgctcaaaaagacatggaacgcggcgtgaagcaccatatgaagagtcgctcccgatgattccattaattcacgcaccgctttttccgtttcacgccccgctctgaaacggacggattgtcctttaaaactttgaaccggcggacgggggaaatcggtcggcagattcaattcaggaagctcgccggaaaatgcggagagccaataacgctcatggtctttcatccgttcggcctgctcgggttcattctgccagacggcgaagtctttatagtgcagggtcggcgacggcagacttccccctttataaaggtgagcgagctctttgaccagcatgcttctggacacgccgtcggcaataatatgatgcatatccagcagcagcaggtgtttcttttcattcagtctgacaagagcggcccgaatgagcggagccgcactcaaatcgaacggcttaatgaatgcctgaatgataagatccgctttctcctcgtctgctgcttcaaagatgtgcaggtcgatgtcagcctgttctgcgatctgctgcatcgggcggccgttttgatcgataaaggacgtccgcaaagattcgtggcgatcgatcatctgattgagcgcttcctgaagccttgaaatattgacttctccttccatcagaagaacggacggcatattataactgattgtctcccggtcaagctggttcaggacgtacatccgtttttgggcggatgataacgggtacgcgtctgcactgtcggccggtgagatcatccgatatccctcagataccgctgatttttcgatatatgcggcaagcatgcggacagtcggctgttcgaacagcgcttttaacggaaccgttttgtccagttcagcctgaatattggcgaggagcatcatgccttttaaagagtgcccgccataatcgaagaaattatcgtcaatgccgagcgtatccgtaccgagtgtctgtttccaaatgcggcacagcttttcctccaattccgtttccggcaaggctgaagctgtttgcgccgtttggctgacgcccggtttcggaagggcgtttttatcggtttttccgttggctgtgagcggaatgcggtctacttgcatgaaataagccggaagcatatgagacggcagtgtttcggaaagccgtttgcgaagctcagagcctttcagctcgctgtcggctttatagtacgcgcacagttccggcagcccgccttcgctgactgcgagaacgaccgcctcctgaatgccgtttacgcttaacagcacagtttcaacctcttttaattcgatgcggtagccccggattttcacctgatcatccgcacggccgataaattcaatcgtcccgtcaggaagcctgcggacgacatctcccgttttgtacatcaggctgtccggtgaaaaaggatttgagagaaatttctccgccgtcagctgcggacggtgaagatatcctctggcaagccccttcccggtaatataaagctcgccgcttgcgcccggaggaacgagctgcattgctccgtccaatacaagcgcgccggtattcgcgatcgggcggccgatgacgggacgctgttcatattgatcaaggcgctccatattgatccgtccggcaatggcgccgatcgtcgtttccgtcggcccgtagtgattgatgaagtcggtatgggcgtatacgtcatgaaacttgcggacatcggacgtgatgatcttttctcctccgagcaccactaaacgaagcgggctgaaacggcgttctgatgtaaaacgggctgtattgacgatcatatggaacaatgacggcgtcagtttcatatacgtaatgccgtttttctgtatatactcaccaagctgatcaggcgcggtgtacgtctctttcggcacaatgtgcagctcgccgcccgcctgaagaatcgggaatatagccgtatagccgaggtcaaatgcgtaagaagacagcagcacggatttgtcagcttcggtcaaatcggcttcacggctgaaccatgtgacataattgattagattacggtgctccagctggacgcctttcggtttgcccgttgttcccgaggtataaatgatatatgcaagctggtcggcgccgggctccgtttcaagccggtcggcgctttcgttctgccattctccgtcttccattacgaccgtttttcctttataaacggcggccgcggtcatgtttctctcattgacgaccagaagcttcgttccgctgtcttcaagagagtagcggattctctcttcaggagtccccggatcaatcgggagaaatgccgctccggctttcatgacgccgagaatcgcggtaatcaagtcggccgaacgatccatcataatggctacgatgtcctcactgcccgttccgcaagcctgaaggtgtcgggcaaaccggttcgagcgttcatcaagctcacgatatgtcagactagttccgcccgcaaccgccgtgagatcaggcgttttttgcgcttgccgttcaaacagcgaaacaaaagtgccctcaggcagatccgcctccgtacgtttttcatcaaaaaggagcgcttcccgttcaggagctgacagcaggcttgcgtcggccagctgaatatccggattttcggcgcaggctttaatcagattgacaaaatgagcgctccagcggcggatggtttcgtccgcaaataaggctttcgcgtaatcaaagctcaatccgacctcttctccgcgctcagccgcttctaaggaaagatcaaatttagcgacatgatgatgcatggagtaagaagaaatctccaaatctccgagccgcagggccgggatctccatgttctgcatattaaataacacgctgaacagcggactccggcttgtgtccctcgttaacggcagtttttcaattaattcttcaagcggatagctttgatgctcaaaagcttgaaggctcgccgttttcacctcatccagaaattgtttgaacgtttttttgccggcaggatgcgaccgaagcgcaactgtgttgacaaacatgcccggcacgtcttggagatcaggatgctgtcttccggccgccggagacccgactatgatatcttcctgccccgaatatttggacagcagcacttgaaaagcggctaacaagaacatgtacatcgtcgtatccgtatcagccagcagcttcttaatctgcgccgtcacctgtttatcaagcccgaagatgacgcgttccccttcaaaactgcgctcggcaggacgcgggaaatcaagcggcagatccaacaccggcagatcgcctttgaacgtatcaagccagtaggcttcgtgctgatcgagatttgctttttcacgctgccagactgaaaaatccttataatgaatctttggcagcgcaagctccgtgccttgataaagcttcgcaagatcaccgatgaaaatgcccattgagcttccgtccgtaataatgtggtgcatgtcaatcagcagaagatgccggtcttcttcaagccggatcagcttcgaacggacaagcggcgcgcggttgagcgcaaacggcctgataaaggcttttgtcagctcttctgcatcttcttcccggccctcggcggtttcaagctcaaacgacacatttttatgaatggtctgcacgacttctccatctgccatgtcaaacgacgtacgcaaggtctcatgacggttgattaatgcctgcatggcctcctcaagacgctttttgtctactgacccttccagcaaaagtacagcagggacgttgtagctcgtgctggcctgtccgagctgattaaggatatacatcctgcgctgtgctgaggaaacaggataatgcttctgataaggcgcttgtcggatcggttcaaactgctgttcctcctcgctctcatgctgcaaataatgcgcaagctcctgaatggtcggcttttcaaataacactttaatcggtacttctttttgaaagtgctcctggattttagcggtcatcatcatggcttttaaagaatgtccgccaatcgtgaagaaattgtcagtcacacccgcttttacaccgagaatgccttcccaaatgtcggcgagtttctgctccgcttccgttttcggcgcttcgtattcttgttgaacggcttcagcctgaggctcaggcagcgcttttttatcaatttttccgttcgccgtcagcggaaactgattcatctggatgaagtgcgcgggaatcatatattccggaagtgattccgaaagtgttttgcgcaggtcttccggcgaaagggcttggtctgccgtaaagtaagcgcagatttcattttcatccgctttatttttccggatcacagccgcagattccgtcacattctccgcctggctgattttcgcctcgatttcgccgagctcgattctgaaaccgcggacctttacttggttgtcaattctgccgagaaactcgatcgtgccgtccggaagccacttcgccaagtccccggtccggtatatcatttcatccggtctgaacggatcgcggacaaactgcttctccgttaattcaggcaggttcacatagcctcttgccactccgcttccgccgacgcacagctcaccgggcgcgccgatcggctggaggttgcggttttcatccataatgtacgcagtggaatttccgatcggcttcccgatcgggaccgaaccgtcataatcctgatcaatgagaaagctcgtcgaaaacgtcgtattctccgtcggcccgtatccgttccaaagcgacagctccggtgatgccttcctcactttgctgacgatatgcggcacaagcgcatcaccgccgatgatgaggtgccggagcgtgttaaacatgccggcatccttttgggcaagctgattaaacagcggagacgtcagccacatggtcgtgatccgctgctctttcagaaattgggcgaattgtccggcgtcaagcagcgtctcttttttcgccgggtgcaatgacgctccgttcagcaatgcgccgaagacttcgaaggttccggcatcaaagctgacggctcccgtttgcgccatccggtcttcttcatgaaccggcacgtaattcgaatgtttgacgagcctgatgatatttctgtgttcaatcatgacgcctttcggtttgccggtcgatccggatgtatacatgatatacgccaagtcgttgccgccggccggaagattcaagtctgttccgcttaccgtttcatccgcgctttcatccagcatgacgaccgggacttgcaatgcgcccgcttgttcttgatagtcctgaactgtcagcacgagccgaatcgagctgtcttccgccataaagcggagacggtcctccggaaaagccggatcaatcggcacatatgcgccgcctgcttttaggacggcaagcattccgataacggtttccgcagaccggtcgttcataatagcggcggtccggcctttttccagcccgctcttcacaaggtgtctcgccagacggttggccgcttcgttcacttcacggtaggtccattcgcgtcccgcttcttttatcgcgatgcttgcaggcgtccggtttgcctgtgcttcaaacaaacggtgaacggcctcctcttccggaagcgccgttttcgtatcattgaatatctcaacaatctgccgctcttcttcgcctgaaacaaggccgagttcccgcacgggcgcgtcaggcgttccgaccgcggctttcatcatgcgggtcagatggtgcgccgttcgttcgatggcatcatgagcgaaagccgctccgttgtatttgattttgacagtccacgtttttcccggatacacgatgagattgaaatcaaagctcgtctgctcaaaagcatgttcaactttaatggaaaagccgagtctttcctccatgcccccgttttccagctctttgtccagcggatagttttcaaacgcgaccaaatgatttaagaggctgccgtccagggcggagcgcttttgaatgtcatagagcggcacataatcatagcgctcggcttccacggcatttttctgaactgccgccatcacgtccgaaaaggctgcatctttgtcaatcttgattctgacgggaattgtattgatgaacagccccgccatcgtttctatgccgttgatttctgaaggacggcctgatacgacggtgccgaacaccacatcgtctgtatagttgcatttgctgagcaccgcaccccaaacggcctgaaacaggttaggccctgtgacttgatgccggttggcggtctgctgaatctgcgcgaccagctcttcatcccagacaaaagaatattcttcattttggtagtctttcttttctgatgccagacggcccgggagcaggctcggctgttcgaaatccgccagtcggctgctccaatattgttccgcctcctcataatcccggcctccgagccatttgatatagtcagagtaaggtttgccctggcttcccccggcaggccggccggcacgaagcgcttcatagttttggaacaggcttttcatcaaaacgcccatactccagccgtccatgacgatatgatgattgctccagacgagatacagctctttctcactgagtctgaacaccgctgctttaaagagaatatccttcgccagatgaaagccctgctgctgcacgccgcgtttatagcgttcaatatattcggtttggcgcgcttcatctaattgactgatatcttcatagtgcaccttcgtcttccgctcggctaatacgacttggcgcggtttttgaagctgctggtgcacgaataccgtacgcaggatgtcatatgtccggatcagctcattgacgcttttttcaaaaagctccagctgaaaacttccgtgaatcctaagctctaattgtgtgaagtaggaggaagaatgcggatcaagcagcgcatgatacagcattccctcctgcatcggtgtgagtgcatacaccttttgaatcgattttttgctcatatgtcacctctgtcttttctgttagagaatttccattaatttatcaagttcatcaagcgtcagatcatcatcgccaagatcgctaggcgtaagctcaggtccgtcttgggccaggcagtgatctatgattttcaggaggtgccctttaaagctgtcactgaacgattgaatggttttttcatgaaattcgagagaatgataggcaaacgtcatcgtcatctgcccattttctataaatccgacaatatcaagcgcattcggcttctctgtgtcagggctcagcgattgtcctgacggcatcccggatcttgtaaataagccggaatccgacatctcattaaactggcctaagtagttaaagctgatatccggatcaatctcaaatgaaagattctctttatgctcaggcgccgttacataacgcagaatgccgtagccgactcctttgttcgggatgtgtctgatgtcttctttcatttgtttcagctgatatgaaagatcgtcggcgtgcttcatctcaaggatcatcggatacatgctcgtaaaccatccgaccgtccgggtgatattcaagccgtcaagaatgtcttcgcgcccgtggccttccaaatgaacgccgatcgtgtcttcacccgtccactctttcaacgccagtccgagcgccgtgagcaggatgtcgttcatttcggtgtgataggcttcatgtacgtttgtcgtcagctgttcagtttgttcaggcgtcagagagaagctgaccgttctcgtatgtctcatgcgctgatcaccagactgcctgtctttcggaagctgagtgcatacctctttttcctcaagctctctccagtaatccgcttctttcagaaacgccttcgtatttgcgtattctttgattctctcggcaaattcggcgaatgaatgtgttttcggcggcagcgccggttcattgccttgcttcagctgcgtatacacggacgtaaagtcctccagtaaaatccgccaagatacaccatccacgactaagtgatggattgcgagaagaaggtggtctccatcttcagcccggaagagcccggctttcaagagatgtcctgtttccagtgaaatactgctttgaagacggtctgcttccctttcgatacgatcctcatggtcttcagcaggtccgttcagctcaaagacattcagttcaacagacgcatcctcaagccctctgtaatacggtttttgttcacgataaatcatccggagcgcatcatggtgcaccgtcaggacatgtaatgttttttctgttatctccggatcaaagccgtctttcgcgtgaagcatgacggattggttccagtggtgtttgtccgtgaagttcttctcaaagaaccagcgctggatcggcgttaaggccgcttcgccttcgacaggtccctggtcggcctgcttgccttccgtccgctccacataagagacgagctcttcgatggtcggatgctggaagagatccttcatctccagcttgtagccgtgctggttcagacggctcgccatttggatgcctttgatcgaatcgccgccgagagtgaagaaattatcgcttacgccgatctggtcaagaccgagcacttcctgccaaatgtcagaaagcagcgtctccatctctgtttccggcgctttgtatgccgcgcttcccgcttcaatatccggttccggcagggcttttttgtcaatctttccgttcgcggtgaccggaagctcgtccatctccacccagaaagccggcaccatgtagtcaggcagcgtgtctttcagcgcggatttgagcgtttcgatatcgtcctgctgaggcgcgacataggcgcaaagcgcggtattgcccgctttgtcttccacggccgtcaccgctgcgtcatgaacgtccgcaagctgggcgaggcggacttcgatttctgaaagctcgatccggtagccccgcactttgacctgctggtcgatacgcccgatgtattcgatgccgcactgcgcgttccatttgacgaggtcgccggtccggtacatgcgctcgccrggcacgaacggatckgcggtaaaccgcttcgccgtttcttcttcacggttcaggtatccgcgcgccagaccgcggccggccacacacaattcaccggcaatgccttccggctgcacctgatcgccgtcgccgagaatataaactctcgtattggcaatcgcccgtccgatcgaaagcgatccttcctcctccggattgatgacgccgcttgtcgcgacgacggtgttttccgtcgggccgtagttgttgatgatcgtgtacggc

SEQ ID NO: 7 - DNA, 153010 bp, Bacillus subtilis
atttccaaggacggtttcgtcaaaatgccgacacgttcgtcagccgtgacgccgcagtccatgagaatgcgcgcgatgcggttcgcccttgcgttcagctcgccgtacgtccatttcgcgccgttatatgccgcggccggccggttcgcgtagcgggcggccgtttcttcaaagagacggtgaaccgttttgtcccgcggcacagaaattgtttttcctttccatgcgtcaaggagagcttgtttttctgttttattcaccaatgaaagctcagaaagcttcgcagccggattttccgctgcggcttctaacagttgaagccagtaatgcttccatgtctctgccgtttccggtttaaacagcgcggtgttatattcaagcacaaacgttaaagcttcgtctgtgtcctcagccgtcattgtcaggtcaaacttggctgtttttctgtcaaacggatggtgcttcagctcaattccttccatgaccagatcttccgcatttgcattttgcattgagaataccgcatcaaacagcggatttctgctcgtatcacgctgcacctcaaccttttgcagaaggtcttcaagcggataatcctgcgcgtcaaatgcatgtaaagcggtttgttttacttctttaagatagtccgtgaacgttttgtccgcttccggatacgtacgaagcgcgagtgtattcacaaaaacaccgatgacgtttgcgagatccgcatgtgaccgtcccgcaaccggcgagcccacaatgatgtcatgctgtccgctcagttttgagagaaaggcgctgtatgtcgccagcagcaccatgtacatggtagaatccgtttgtttcgcaagactgcgaagagccgacgtctgttcctcagtcagagaaaagaccagcttgtctccttcaaaggtttgcacggccggacggctgtaatcagccggcagcgtcaataccggaagctcgccgtcaagctcccgaagccaatgctcctcctgcttgcggtactgctctgattgaataaatttctgctgccataccgcatagtctttataatgaatccgcaacggctcaagcgtttcaccgccgtacaagcgggacagttcatctatcagcacgccgactgaagcgccgtccgaaatgatatggtgcatgtcaaacagcagcaggtggtcatgttcagccagcttgaccagtcccgttctgacgagaggaagctgatccaggcggaacggccggataaagctctgaataatccgttcagcatcttcttcagaggcttcataatattccatgtcgatatcagcttccgtccatatgcgctgaaccgtttctccatcctgtatgtcaaatgtcgttctgaaggcttcatggcgttctgtcagctgtttcatgacggatttcagcttttctgcatcaagctttccttttaagcggagcacagacggcatgttatagcttgtttcagcgccttccagctgctgaagcacgaacatccgcttctgcggtgaagaaaccggatacgtttcccgctcggccgccggtgcgatgctctcagccgccttccgctcagccccttcaatcagctgcgccagccccgcagccgtcggagaagtgaacagatcctttaaggtaagctgcacgccgaatgtcttctggataagggccagcagtttcatccccgctaacgagtggcccccgatctcaaagaactgatcatggacgccgacacgttccatttgcagcacttcagcccaaatatccgccagtttttgttctgtttcattgcgcggcgccgtatatgacacggcattcgctgcggtcacatccggcatcggcagcgcccgcctgtcgatttttccgttccctgtaagaggcagttcatccaattgaataaagacggatggaatcatataagccggaagatccttcgccgtatgctccctcagctcccgggaagagatttccctgtgaccgacaacatacgcgcaaagaagtttgtcacccgcgccctgatccacagcgagcacaatgcattcctgaatctggtcatgactttgaagctgatgctcaatttcgccaagctcaatccgctgaccgcggatttttacctgatggtcgatacgtccgataaactcgatatcgccattcggaagccatctggccaagtcgcccgttttatacatccgttcaccttccttaaacggatgctttacaaatttttcttccgtcagttcaggacggttgtagtagccttctacgagtccttccccgctgacgcacagctctcccgcgatacccgccggctgaatgcgtccggctgagttcatgatgaagacttccgtattgctgaccggtttcccgatcggaacggagagcgtatcctcttcaatgacatccaccggatggtatgtcgcaaacaccgtgctttccgacgggccgtacatatgaagcagtcttccttttccgactgccgcaagcgcctttttgacatgttctacagacgctctttcgcccccgaacatgattttccgaagcatcgtcagacaggacggctccatatcaacaagcaggtggaacagggccgtcgtaatcatcagaatgctgacgttctcccgtttgatcacacgggacaggcgtgacatatccagcaccgtatctttcgggacgatcacaagctttgcaccgtttaacagcgaaccgaacatatcaaacataaaagcgtcaaaaacgtagtttgacagaccgagcactgtgtcctcttcagaaacagtcaaatagttcgtgttttttaccgtccgcaaaatgttggcatgtgtgacgatgtttcctttcggcgttcccgtcgtgcctgatgtataagtgagattggcaatcgttttggaatcaaacggcaatgctggattgcgagagtccttttcatagctcgcctcatcatcagcaagcacaatgacgccttgaaaaccggccttttccgcaatcggcttgaggctttgctgagtcaggagcacattcgccccgctgtcgcagaagaaatgctgaatccgctgaaccggatgctcaggatcaatcggcacataggcggaccccgcttttaacacagccataatggaaacaatcatatccattgaccgttcacacagaacagccgcggtttttccgccgcctccgaccgaaagaatatgccgcgcaagcctgttggcgcgttcattcagctgctgatacgacagggtttccccttcgaactgtagagccgtccggtcagggttctttcgggcttgttcttcaaagatctgcacgatcgtttgctctttcgggtataccgtgcgttccgggttgaaccgctgtaattgattcaaagcctcccgttcagaaagcagatcatattcgctgattttcgcatccggctgagctgccgcgctttccagcagacggacatagtgcgcaagcatgcgatccgcagttgagcgcttaaacagcttcgtgcaataatccaaatcaagcgcaatgccttccgctgtttcccgagcctgcatggtcaggtcgaatttggcgatattgaagtttgtttcatgaagagacagcgtcagattaccgatctccggaattccgtccgaggcgttttgcagactgaacatcgtgtcaaatatcggatgcctgctcatgtcccggggcacgttcagttcctctgtcagccactcaaacggataatcctgatgagaaaacgcatccagcacctgcttgcgcacatgacctaacaagccggcaaatgtctgatcctgcttcacggagcttcgcagcgcaagcgtgttgacaaacatcccgatgagcccctcggtatcggagtgatttcttcccgctgacggtgttcccacgatgatgtcttcctgtcccgaatacttagaaagcagcgtatagtatgctgataacagcaccatgtaaagggtggctccgtttttctccgcaagcttctgcagccgttccctcagcattttcggcagcttggcggacacgcggtcaccttcaaagctttgcacctgcggccgcggataatcagggagcagctgaagcaccggcagttcgccgctgaagacttctttccagtacgcccgctccttcttgtagccttctttcgcccgttccgcctgccatacggcataatctttatattgaatgcgcaattcaggcagctgatttccgccgtagatgtcagccagttccttcagcatgatggaaatagacaccccgtcagaaatcaggtgatgcatatcaaacagcagcatatggcgattgtgaccgagcgtttgcaggccgattctgaacagcggcgcctcagataaatcaaaacggcgcacaaagtccttcatgacctgttcattcgttcttccgcgcgcttcgatcatttcaatatgaaacggaacatgctcgccaatcacttgtctcggcgtgccgtcctctgattgaaacgatgttctgagcgcttcatgcctgctgattaaggcagaaaatgcacgctcaagcttttcacggtctaaagcgccctcaatcatggccgcagccggcatgttatatccgactcccgcgtcttcaaattggcttgcgatataagtccgctgctgagcgagcgaaagcggatagctcgcctgcttctcagccggctcaattgcactgaatgccggtccttcgtttcggttttccgcataatcggcaagcgctgcaatcgtcggatgctcaaacaagtattgcagcggaatttcaacgcccatttgcttatgaattttcgtcagaagcgtcattgcctttaatgaatgaccgcctgactcgaagaaatgatcataaatgcccgccttgtccattccgaggacttcctgccagatgacggcaagtgtttcctccgtttcatttcttggcgcggcatattcagatgagctgacagcctgcacatcaagcgcaaacagctttttgcggtccgcctttccgctcggcgtgagcggaatttcgtccgtttttgtaaagtaagcgggcaccatgtaatcaggaaggtgcttggacacatactccctgtactcggcagggtgaaactcggttcctttttcctgaacgatatatgcgcagacatctaagctgccctgctgatccggccgtgccagcacgacggcctgcgccgcgcccggagcttttctgagcaccgtttcaatttctcccagctcaatgcggtagccgcggactttcacctgatcatcttcacggccgatatattcgatcgtcccatccggcagccagcgcgccatatcacccgtgcggtacatgcggccgtttccgttaaacggatcttgcaaaaacttctctgcggtcaaatccggaagatttaaatagccgcggcctacaccgtcacccgcgatatacagctcaccggccgtgccgtcgggctgaagccgctggtgcttatccaatatatacagacgggcgttgccgagcggttttccgatcggaacgtacgccgcctgttgattcattccgttatccgctgacatctgatgcacggacgcatctacgcacgtttctgtcggcccgtagacattcgtcagacgcggcgtcctgcccgattgatgaaagagcgtcatcagctgttcagcaacagcggcggacaggccctctcccccaatgagcatgtggcgcaattcaattccgctgacatctcccgccgcaaccatcatctgcagatgtgcaggcgttccgtcagtggcttcaatccggttttgacgataatagtccagcagtgacgagccattcgttacagtcgttttcggcacgatataaagcgtctgtcccaaaagaagcgaggcaaaaatctgtttgacggacgcatcaaaatgaaacggagccaaaagcgccattcttaacgtctgctcaccgcattgataaatctcctgctgcagtgattgcaccagatgatgaacttgccggtgctcaatcatcacgcctttcggccgccccgttgtacctgacgtgtagatgatgtaagccagccggtctgattgtgtggtgacaccgtccgcagccgtctcatactgaacagcctcgtcaaaatcaatccgttcggcatccgctgcaggcgcctgtattccggcctccgtcagaacagccttcgctccgctgtcctccaaaatgtactgaatccgatccgccggaaagtcaggatctatcggcacataggcgccgcccgctttcaaaattcccaatattgccgcaatgacacgctcagaacggccaagcagcaccgcgacaggagaatcggctgatatcccggcttgaagaaggcgtccggcaatacggcctgactgttcatgcaatgtgcgataggacaatgttcggccttcatacacaaccgcgggtttgtcagacagtgacttcactttctcttcaaacagccccggaatcgtcatctccttgcggtaattcaccggattgccggaggcccgtttcagcagccgctctttctcggattcagaaagaagagtaagttcatcaattatgcgatcaggagatgaaatcgcatcttcaatcagcgtgatcaaacgttcagaaacagattcaatctcttcccctttgaaaatgtcgctgcgatagtcaaaatcaattgtcaatttcccggtgtcccatcgttccttcacatgaattgaaatatcatttgtaccgcttccgctgaaaatagggtctgtcaggaaggacagattctcttttttctgccactgcatcacctggtactccagagccaccgtaaacaatctgctcagcgaacttttcgaagcgcgcaaatcattgacaagcagattatacggatacttttggtggcggagaattttcatcagatccttcatccggcctttaacgaattccaagaacgactgtcctccgtcaacgtttgtccgcacaggcaccgtagatacgaacatcccgagcatctgcttttctttcgcattcgtccggtttcccataaacgtacccgtgaccacgtcatcccggccggtcactttgtagagataagtgatcagagctgactggaacagagatagtacgctgactttatgctcctcgcagaatgaatgaatgcggccatataagtcgtgaggaatttcttgagaaaaccgtttcgcatcaagacccgcatctgcctggctccgtttcagggacacaagctccggcacggtctcaaactgcccgttccaaaaatcccgatcctttttaaaccgcttcgactgcacatattcctgctctgtcagcacgtgctcaataaaagaaggaatctccgtctgttcctcacttgtcccgcctgaaagctccaaataaatatcagtaatcgcattgcccagaatcgtcatggaaatcccgtctgaaataatgtgatgcacattagcgtaaaaccagacctcattttcactgatcgtgtgcacggaaaaacggaataaatcctgatcatataacgccagaggcttgccagcttcttcacgcccccatttggacagctcgtccgcagagcagccggcttgcctgatatctgtgtgcccgatagagagcggacggtattcgctcacatattgaacgggctccccctcatcatcaagccgcagacggattctcatcgactcataccgccggacgaattcctgtatcgctttctcaacgtaatgagcctgtacgccgtcttcagaaatgagtttcccgaacccggcaagatttgaaatacttgtgttcggatagaatttttctgtataccagatacgtttttgagcatttgttaaaggataaaaagttatttccatatgtgtgcgcctcccctttttaagataaagttgtcaattctcccttagaaacagcctccctctatgtccctaactcattctcaagccaaaagaaccacttacctccaaaaacgatcccgattcaatcaccgccgaaatccgtcatccgttcacccgcgcagtccgaaatgcggcatcaaatttatgagaaatcaagacaaaaagccattgattgtaagcacgaaaggtttacctatttctgcatgtatttctatatatctacttacgttcactttatatgaaaatattgtttttatcaccgaaaaatgggtgaaaagtttcatgcggcacaccgaaaaaaaatccgacgaatccagagggtattttgcggcatcccgcaatttattttcaaaaatattatttacgtaaaattaaaaatctttaaactataatgaaaatctgtcaaatatccagttatggcagaatgaaaaaaatttacgtacgtaagctgacccggaaaaaacagcgcaagaaccgaaacagacggtccgaatgttcgcaatatgatttcattaaaccgcaaaaaaagcactctattttacatagagcacttcaaaaagattcctttattgcagttttatcaatgttgattaattccatataatcttttccccacttatacatggcgtccagaatcggcataaggctttctccttgcgccgttaaagaatactccactttcggagggacgacagggtaaacttccctgtgaacgatcagatcctgctccagctccctgagctgattcacaagaattttgtgcgtaatatccggaattaaagctttcagctcattaaaccgcttcgtcccttcttttcccaagtgccacataatcagcattttccacttcccgcctatcacggcaagcgtcaattccttttcgcaattaaacgttttctcatccattcggctcacgggccattctccttcctcttactttttgtacgttgatcatctattcatacacgcttacttttttacacaactttcatcagtttatagtaccacgcagttttgctgaaacaaagcgcattgcctgcggggacagtatcctaaaagtaactattagacttcaaagtgcgtacttctcaacatgcggggcactctatagaatggaaatacataaaaaagaggagtggatataaagtggaattacagctggcattagacttagtgaatatcccggaagcaattgaacttgtgaaagaggtcgaacaatatatagatgttgtagaaatcggcactcccgttgtcattaatgaaggcctgaaagccgtacaggaaatgaaatcagcctttcctcacttgaaagtgcttgccgatcttaaaatcatggatgcaggcggctacgagatcatgaaagcggcagaagcgggagccgacatcatcaccgttttaggagcgacagacgactcaacgatcaaaggggcggttgccgaagcaaaaaaacagcagaaaaaaattctcgtcgacatgattaacgtaaaaaaccttgaaactcgggcaaaagaaattgaccagctcggtgttgattatatttgtgttcacacaggttatgatcttcaagcagaaggaaagaattcattcgaggaactgacggcgattaaaaaagcggtcaagagcgctaaaaccgcaattgccggaggcattaaacttgatacgcttcctgaagccatcaaacaaaacccagatttaatcattgtcggcggaggcatcacgggggctgacaataaagcggatgctgctgctaaaatgaaacagctgatttcacaaggatcatgaaaacgactgaatacttacatgaaatactaaatgaaatatcccgcaccgcagcactaatagccgacagtgaagctgacaagcttgcagatcagattttaacggcagatcaaatcttcacgtccggagcgggacgttccggctttatggctaaagcgttcgccatgaggatgatgcacatcggtctgaacgcttacatcgtcggtgagacgcttacccctcccctccaagaaggcggtctcgtcatcatcggctcaggctcaggcgaaacaaaaagtctgcttcatacagctgaaaaagccaaaagccttaacggcatcatcactgcattaacgattaaccccgactcaagtctcggcaaacttgcggatcttacaataacgattcccggctctcctaaggaagagaccggcggagacagaaagacgattcagccgatgggttctttattcgaacaaactcttctgctgttttacgatgcggttattctaaaaatcatggagaaaaaagaattgaattcagcagacatgtttacaaagcatgcgaatctggaatgatttgctgacggccttcttatcagatggccgtctttttatcgtcttgttgcgcacggtgacaagacggccaagttttgcgggtcggacactcgcagacaaagatatcctgcggtgagcttatcgctataataagtcaattgacgatatacccgcaaccattcatttctgaatagggaaacggcaaaaaacactttctgattgaatttttaatgaataaagttgatttgtgcggatggttttacagatattcagctgaattgcggctgagaaatatattttaacagctttacagccggccgattctgctttattcttggaccagctttacagcaattaaaactggaggtgattgatactcttgaaaacattaaaagcactgctgcttgttcttatcatcattgccggagcagtcgcggccctgatcaagggtgatcttttctcagataacgagcagaccgttcagaagagtgattacgacaaagtaatcttatttccgtccgatcgatatccggaaacagcaaagcatattaaggacgcgataaaagaaggacattccagcatatgcaccattgacagagacggagtacataagcggcgtgagcaatctcttaaacatgtgcccgtcaaaacgggatacgatagagatgaatggccgatggcggtttgtaaacagggcggaaataatgcctccgtagaatatatttctccggcagacaaccgcggagccggctcttgggtcggacaccagcttaccaatgatcccgacggaacgagagtattatttaaaatcaagtaaaaaacaggaggaacagcgcattgaataaatcatggaaaccgcaagaactggccatttcttatcatcaatttacaatcttccaaaaagattcagaaccgcctgttatcgattggaccgatgaagccattgaaaaaggatatgcggaagctgacggagctgtttcatttgaggcaaggagaaatacgagggcatttatcgtcctcaggcttaacacaagtgaaccggtaccatcctatgagaaaaaagcgactgttccctttgaggctgtaaaagatggaattgagattgaaagcgtgatgtcaaagcggcttttctttcatattccgaaaggccgatacagccttacctgttattcagtgcctgccgaaatatccgatcttcatgcggatacgtatattattgatgcagccgcaatgtaaaagaaagccctgagagaatcttatttctctcagggaacttttataaacttttaccgtttgtttcaattacattctggtaccaataaaaactttttttcctgatccgtttcaaatccttttcatcttcttcatctcgattgatatacacaaaaccgtagcgtttttgatagccgttcagccagcttaacagatccgtgaatgaccagctgcagtagccgatgagatgaactccgtcactaatggcctctctgcactgttcaagatgggagcgtaaatagtcaattctgtagtcatcctgaattgagccgtcttcttctattttatcgaattcccccagcccgttttctgttataaaaaccggcagctcatagcggctcgttatacgccggaggccgatgcgcagacctatcgggtcaatcgtccaatcccaattactcgtcacgaggttaggattctttttcgttttaaacagccccggtataccggtatcctggtttgtccctttctgaccagtcgtgttcattttcccctccgatacaccgtcaagaggatttctttcgtacgtaatcgtctgataataattaacaccgataaaatccggcttgcctttcgcaagcaattccatatccccggcttcaatggcgggcgcccagcccttttcctttaaataattgaaaggaatttgcggataagttccccggcaatacatatcaagccaccaatgattcataaattcctctgcgttttcaaatgcagttatgtcttcaggatgacttgtaagcggataagccggtgaataagcgaagctcgggccgatcaaaccgtcaggaacatattgtctgaaggattcaatcgctttggcattagctaaaaatgcgatatgattcgcttcataaaatcgttttctgtcctttacgccgggcggatgtgcagctgtaataaacccgttatgaaaattataattctgctcgtttaacgtgacccagtatttcaccttgccggcaaatcttttgtataacgcaatgcagtaatcattaaaatcattaataatttttcttgattcaaagccgccgtattcatccatcagcgcctgaggcaagtcccaatgataaagagtcagcaccggctcaatatcgttagaaatcaattcatcgatcaggtcttcgtaaaatgcgatccctgattcgttgatttcccctctgccattcggaaaaattctcggccagctgacagaaaagcggtaagctttcaaacccatttctgccatcaaggcgatatcttctttataacgctcataatggccgactgctgtatcgccatttgagcctttaaacgttttacccggtaatttcgtgaataagtcccatactgaaggtcctttaccgtctttattccaggctccttcaacctgataggcagccgaggctgacccccatagaaatgtatcagggaacaggccctgttttttatgtaacatgtgtttcatcctcctgatgcgtatgatattgatatcatacgttatgaaacgcgtttcagagcaatcccgataaaaacaaaaaagcatccggcttgccggatgcttaagaatgatggtgccgcttttccaatttatgaggcggaggcttcgggacaaacccattttgtttcatcatgttaaagcgcctgtccatatgctgtttaatatgttctgctttttctttcggcaggaccccgtactcaacatatttggatataacatgttttcgtttttcgagcacttctttttcaagtgattcaatttcttttttctgctgttccgtgagtgacattgttgaaggcatttttgttccggcggcgtgtgccggcattgtgaaaaccattgctgtaatgaaaaatgcagctaaagacaatgcagcttttttcatgactctttcctcctttaacgtttgttatatgttgctccctcatccattttttatgcaaaaaaaagagcgaaattattcgctcttttcaatcgattcgtccggcagcgcgtatgtgacatacgttcctgctacaaaatcgtggattgaccgtttgtcttctctcattccgaccatgaatgcgctcacgatcacgccgattccaaacgtcacgccatatatcaggccgcccacaagcactctcaaaatcatagtgagaaagcctacctgagtgccgtcttttttgacgatgcggataccgcagatctttttgccgataacataaccgttccagtatacagggagcaaaatagcataaagagtcaaaatgatgctgatcattgtgctctcattcggatcttttcctgttgccagcataaaaataatcgccaaaggcactgaagtaattaaatagtcgagtaccacggctcccaatctgatccaaaatcccgccggtctgtaaatattcatcgtgtttctcctcgctatggctttaaaatcactttaatgttgccatcttcttttttgtcaaatatatcatatgcagcaggagcttccgcaagactcattttgtgtgtaatgatatccgtcggatcaatttcattttgttcgatcatttgatacagcatcggcatcagatgaataacgggtgcctggcccattttcaaagaaacgttgcgtgtgaaaaaatcaccgagcggaaagccgtccgcttcagaaatgtatgcgcccgtgagctgcacggttccgaacttcttaacggcttctgatgctgtaagaatcggactgatcgttccgaactgattcggtttttgctctgctttttcttttgaaagcggcgtgccgtccattccgacacaatcaatcactacatccgcgccccctgacgtatgttcatgcagcagtttcccgatctcatcatgttctgaaaaattgaaggtctctgctccgtttatgcgtctcgcatgttcaaggcggtgcgggacttgatcaactgcgataacccgtttagctccttttttccacgcgaatttttgcgccattaagccgatcgggcctgatcccagaataacgactgtatccccttttttcactccgctgtgctggacgctccaaaaggcggtcggcatgacatctgacagaagcagcacctgctcatcttcaagctcactgtctgccggaaccagaaaagaagagaaatcagcataaggaacacgtaaatattcagcctgcccgccgggataattaccgttaaactccgagaaaccgaataagccgccggcatctgtatgagggtttggatttgattcatcacactggctttccatctggtgcttgcaataatgacattctccgcagccgatgttaaaaggaatcacgacccggtcgccttttttcagctttttgacttgactgcccgtttcttcaacgattcccatcggctcatgcccgacgatataacccggatcggcgggtattccgtttttatataaatgaaggtctgaaccgcatatcccggttgcggtgattcgaacgatgacatctctctcatcttgaatggcgggtgccgggacttctttcacttccatatgttcttttccttggtatgtcagtgctttcacacttggtcagctcctttttcatcactccttcccttttcacctgcttctaaacttggccggtatgttattcggcccgctgaatatcccattgaaaaggatcttcaagctgcgaccaatcggaatcgaactcagacggcgtgagcaggcactgatccaattcctttgtaatggctgcttcatctaaatctgttccgataaacaccaggttcgtatgacggtctccgaattggtcgtcccaatcttccagaatctccggttcctgctgtttgatctgctcctgctcaagtttcggcattgccgccacccaataagaaacaggctcaatcgaaaccgccggacccgcctgagacatcagcagcgcaaggctgttgcgggttgcgcaccaagcaattccttttgcgcgcacaatgttgtcagggattgattgatgcagccagctgtcaaaacgagcggtatgaaacggcagacgccgcgagtacacaaacgaagtgatgccgtactcttccgtttccggagtgtgcgcttcatgacctgccgtcagttcctttatccatcctgctgatgaactcgcttcctcaaactcaaataaaccggtattcaatatgtattcggcgggcacttctccgcggacggaccggatcagtctggcacggggctgtaatgcgcgaaggaccgtttccagctgttcaagctctttttcgcccaccatgtcgcatttatttaaaatgagcacatcacaaaactcgatttggtcaattaataaatcggcaatcacccgttcatcctcttctcccgccgcttccttccggtcaagaaggctgtcaccggactggaaatcatgccagaagcggtttgcatccaccacggtcaccattgtgtccagcctgcagaatgttgtcagatcaatgcccatttcttcatctatataagaaaatgtctgggcaacgggaatcggttcgctgatccctgttgattcaatcacaatataatcaaatctgccgtctttcgcgagtttctcaacttcgactaatagatcctcacgcagcgtgcagcagatacagccgttggataattctacgagtttctcatccgtccttgacaagccgcctccctgcttcaccaatcccgcgtctatatttacttcgctcatgtcattgacgatgacggcaatttttaaaccgttgcggttttgtaaaatatgattcaaaacggtcgtctttccggcaccaagatagccgctcaatactgtaactggaatttttttcatataaatagcctcctgacaaaatagaatgattacgatttatatcccgcacctgcccctttttcatcatgatgtacattgttataaatcgtaaccgttactatttattctgatatattctccgtttaaaatcaagtgaaaaataatcaatcataaaaaagacacgctgtcatacgtgtcttccgcccaaacttaaacatccgcaggactgttttcagtgccatagctttttctccaaaaatagcctgcggccagaacaagcacaaatgcgagcaatgcgatacatgaaaaagagataaaaccgatcgcataagttcccgtcatctgcttcaatgatcctaaaatattgggaaggaaaaaacctcctatgccgccggccgctccgacgattcccgtcaccattccgatttcttttgcaaagtgctgagggacaagctgaaatactgctccgttgcccataccgagcgccatcattccgataaacaacagaacgatcaccgttgaaagcggaggcaggctgctgactcccgccatacatagagccgcgatgataaacagtacagcgagaactttcgcacctcccgcacggtctgaaatccagcctcctgcagggcgaaaaaaactgcccgctgcaacacatattgtgacgaaatcaccggcatggatttttgacaattgatattgatcaacgaaaaaaatcgccaaaaaacttgataatcccacaaaacctccgaaagtgacgccgtacaaaagacagaaacaccatgtctccttctgcctgaaaacgtgaagatagtttttaagcggctgcggtgcgggctgtgcaggagagtccttcgccatgacgataaacagtataaaaacgaccatcaacggaaaaagcgcaattcccattacactgtgccacccaaactgttccgcaaggcggggaccgaacaatgtcgcaaacaaagtgccgctgttgccggcacctgctatccccatcgcaagcccctgcaagtgaggcggataccaccggctcgccatcggaagcgcaacagcaaaacttgcgcccgccacgcccagcagaatgccgatcgcatacagctcagtcaaagaacggccgccgaatgccccccaaagcagcgggatcatcgtgatcagcatcccgatcacggctgttttcttcggcccgatcctgtccgttaacacacctaaaatgatccgaaacacagatcctgataagatcggcagagccacgacaaaccctttttcaaaagaagataacccgaaatcctgagaaatataaacgccgagcgcccccagcattacccaaatcataaaactcacatcaaaatataagaaggaacagagcagagtgagcggatgaccgcttgtttttaattccgacagcttcataacattctcctttccggtcttctatcatttcaaattgctgaatcaagaatatatgaccggcattcaccggaaaagacatgtgtaagataatgcgacacatttaatgcgttaatcaggcaatgtgccataatttctcatagaagaaacgattacttacagactgccgcaaaggaggtttggcgagtgaagaaacaaagattaattgcagcagggaacggaatggccggaatccgctgtattgaacacattttaaagatgaaccgtgacatgtttgagattgtcattttcggaagcgaacctcatcccaattacaatcgcattctcttatcctccgttttacaaggtgaggtttcgcttgatgacattacgctgaatagccgcgaatggtacgaaaaaaacggaattacgctttacacgggagaaacggttgtagacattgatacagaacggcaggttgtcacaacggatcgaaagcgcagcatgacttacgatcaaatcatccttgcaacgggctcctctccttatattctccccatacccggagcagataaagaaggtgtgtacggctttcggacaatagaagactgccaatctcttatcaatgcggccggccggtatcaaaaggcggcggtcatcggcgccggtttattaggtcttgaagcggccgtcggcttacggcagctcggcatggacgtcagcgtcattcaccactcttccgccattatgcaaaaacagcttgatcaaacggcatcccgcctgctgcagaaagagctggaacgaaaaggcttagtctttcttttagagaaagacacggcatccattacagggaactcacgggcggaaggcatccgtttcaaagacggttcttccatagaagcagacctgattgtcatggccgccggtgtgaggcccaatatccgattggctgcatctgccggactttcagtgaaccgaggaatcatcgtcaatcaattcatgcagacgaacaaaccgaatgtgtatgccgtcggtgaatgcgcggagcatgacgggattgtatacggattggcggcgccgctttatgaacagggaaaagtgctcgcgcagcatctatgcggcgtcccgtgcgaagggtttcaaggctttgcacaatctgcggccttaaaaatagccggtattgatgtatggtcggcaggaaaggtgcacgaggatgagcacacagccggcatattgttccatgatgagcatgcaggcatctacaaaaaagcgctctttaaggacgataaaccggccggctttattttattcggggacacgcgcggtaaacagcggcttctcgacagtcttgtgaagcaaagagatatttccatcgtgaaaaaacagctcatggaaccggatcaaggcggtatatcctttgaatccatgcctccccatgaaaccatttgccaatgcagctcagtgaccaagggctccattgaagaagcggtgaacaaatatggcttaaaaaccgcggaggaagtgaagcacatgacaaaagcatccgggtcttgcggaggatgcaggccgctcgttgaagacttgctgaagtatatggcgagcgatgattacacaaaaccctcccgccagccttcgttttgcggctgcaccgatttgacggaagaagaagtcatcgccgaaattcgccgccgtccgttcactgatgccgccgaggtaatgaaagtgatcggctggaaaacagaaaacggctgccgcatttgtattccggcgcttcactattacatggaaaggatgcggcctgattttatgcagttcaatgaaatatcggcagaagagacatgcaccctcattccgcaaatgtacggcggactgacaagtgcggcagagctcaaaaacatcgcagacgtcatcgaagcatacggcatccctggggtttcgatgactgacagtcaccggctgaggctttccggaatcaggccaaatgaccttgcaagcatcagaaaagcactgaacatgccggttttctctccccggcaccgcaggacgattcaaatcagagcatgtacgtgcggacagtatcgctcctttcaagagctggcaagcaggattgaacgagataccgatacacttgccgtacccgcttatgtatccgtcagtttgtcatgtgaaaacaattgcaccgatgcttacattcaagatatcggcgtgcttcagacacaaacttgctgggagatttatatcgggggcgtccgcggaaaacaagcccgcgccggcagccttttttgtgtgacggataacgaagacagtaccgccgctatgatgaaaggccttactcaatattatcgcgaaacggctcactacaacgaagcgatttatcaatgggttgacagactcgggctcgtccatatcagagaaatgctgtttgaagaagatatgcggacacagcttctgaaaaatctccgttcagacatatccctgctgcaaaacctgtctgccgggaaaacgccatacgaaaggatgaagctttttgactgaaccgatgctccgttatttccgtgacaaactgcaagatgtccaatcggaaaaaacatatgagacgcaatgcccgttctgcagcatgcaatgcaaaatgcagcttacggaacaaaccttcgcggcacggaagaaatacactgcaatcggcattgataatccgacgacacatggccgtttatgtacaaaaggcatgaatgcccatcagcatgccgtgcactcttcccgcattacacgccccctgcttaaaaaaaacggtgaatttgtgcctgtctcttgggctgaagcactgaatcgcattaaggaacaaatcaatctgatccaaaccgaacacggcaatgatgcgatggccgtctacgggagcgcctcaattacaaatgaagaagcctatctgcttggaaagttcgcacgggtcggcttacagacgaaatacatcgattacaacgggcggctctgtatgtctgccgcagcaacggcggccggccagacattcggcgcggacaggggcctgacgaatccattatcggacatcccgcatacacgtgtcatcatcctggcaggcaccaatatcgccgaatgccagccgacgatcatgccgtattttgataaagcgaaagaaaacggagcttacattatcgccattgatccccgggaaacggcgacgaccaaaatagccgatcttcacctgaaaatcaagcccggcacagacgcagccctggcaaacggactcgtcaaaatctgcattgacgaacagcttacagacaaagactttatccgcacacgcacaaacggattcgataagctcaaacagcataccgacgctttggatctgaaagagatctccgagcagacaagtgttcctttggagcatatacgaaaggccgccgtgaagtttgccaaggaaacatccggcatgctgtttacagcgcgggggatcgaacagcagactgacggtaccgcggcagtgaaagctttcttaaatatggtgctgatcacgggaaaaatcggcaagcccttctcaggttacggggcgattaccggtcaaggcaacggacaaggcgcgagagaacacggccaaaaagcggatcagcttccgggctaccgttctatcgaaattgaagaacaccgggcgcacattgcgaaggtgtgggggattcatcaggaagagctgccgcgaaaaggcgtctcagcctatgaaatgatagaaaaaatagatagcggcgacatcaaaggactgttgctcatgtgttccaatccggctgtttccggcccaaatgcgaatttcgtcaagcaggcaatcaagaaactgagattctttgtcgcagttgatttatttatttctgagaccgcggcattcgcggatgtgattttacccgcctcctcttatttggaagacgaaggcacgatgacaaatgtagaaggccgcgtgacattaagagaagcgagccgcacctgccccggagaagcgaaacatgattggcagatcatctgttacattgcctcggctcttggtaaagggcattattttccctatacgtcggcggaggaaatctttaacgaactgagagaagcgagccgcggcggaattgctgattactctggcatcacctatgacaggctcaggcgggaaggcggcattcagtggccatgtcctgaagcggatcatcccggaaccgggcgattgtttgagcactcatttgcccatcccgatcacagagctgaattaagcgtgattccaaatgaaccggccgtcccgaaagagaaaccgagcgccggctatccgctttatttaaccacgggcagggtgatgtctcattacttaacgggtgtacaaacgagaaaaagctccgccctggctgcaagacatttcgaatcctttgtggaaatccacccaaaaacggcggccgactatcatatcgaagaccgtgttctcgtgaaagtagaatccccccggggcagcatcacggtccggagcagatggtcggagaacgtacgaaaagacacgttgtttgttcccatccattggtctgacacgcaaaacgtcaacaatttaattggtgaagccttggacccggactgtaaaatgcccggttttaagatgtgtgcggtacgaatcagccctatataatttttcataaaatttttagattttttagtattttttgttacatttcataacatgcatcttaaatatttgtttttgctgtgctacgctaaaaaaaacaaagataaggagcggatcatctgatgggaaaaaaacagctagtccttgttggaaatggaatggccggggtaagagcgattgaagaaatactgcgtgtttcacaagacgaattcgagattacaatattcggggccgaacctcatcccaactataaccgaatccttctgtcaaaagtgctgcaaggcgataccgacattcaagacattacgttaaacgattggaactggtacaaagaaaacaacattcagctgtataccggtgaaacagtcatcaaagtcgacacggaaaacaaaaccgtcatcaccgatgcagacagaatccagccttacgatgaactcatcctggcgacaggctctgtcccttttatccttccgattccgggcgcagacaaacaaggcgtcacggcattccgggatataaaagatacagacacgatgctcgccgcgtcaaaacaatataaaaaagcagccgtcatcggcggaggactgcttggtttggaagccgctcgcggactgctgaatctcggaatggacgtgtctgtcatccacctcgccccattcctgatggagcgccagcttgacgcagcggcgggacgcctgctgcaaaacgaattagaaaaacaaggcatgacctttttccttgaaaagcaaaccgaagaaattctcggtactgaccgtgtcgaaggggtacgcttcaaagacggcacaagcatcgaagctgacctggtcgtcatggcggtcggcatccgcccgaatacacagcttggcacagaaagcggcattccggtaaaccgcggaatcattgtcaacgattatatgcagactgacattccgcacatttacgcggtcggtgaatgtgccgagcaccgcggaatcgcatacggtcttgtggcgccgctctatgaacaggcaaaagtgctggccaaacatatttgcggcattgaaacaaaaccgtatgaaggctccgttctctccactcaattaaaggtatcaggcgtcgaagtcttctctgccggtgactttaacgaatcagaggacaaaaaagcgattaaagtgttcgatgagcaggacggcatttataaaaaaatcgtcctgaggggcaatcaaattgtcggcgctgttttgttcggagacagcagcgagggcagccgcctgttttcaatgattcaaaaagaagccgatatctctgaaacctccaaaatatcaatcttacagcctcttgatcaggaagcaggcgcaagcatgaccgcggcgatgagcgacgatgaaatcatctgcggatgcaacggcgtatcaaaaggcgcgattattcaagccattcaggaaaaaggctgcacatctacggacgaaatcaaagcatgcaccggggcatcccgttcctgcggaggctgtaaaccgctcgtggaagacattcttcaatatacactgggctcagaatttgacgcgtccgcgcaaaaagaagcgatttgcggctgcacatcactgtcgagagatgaagtcgtagaagaaatcaaagccaaagggctgtcccatacaagagaaatcatgaacgtgctcggctggaaaacgccggagggctgctccaaatgccgtcctgccctcaactactacttaggcatgattaatccggctacatacgaggatgacagaacatcccgttttgtgaacgaacggatgcacgccaatattcaaaaagacggaacatactcagtcgttccccggatgtacggcggcgtgaccaactctcaggatctccgcaagatcgccgatgtcgtcgacaaatatgagatcccgctcgttaaaatgacaggcggccagcgaattgatctcatcggcgtcaaaaaagaagacctgccgaaagtatgggccgagcttgatatgccgtcaggctacgcgtacggaaaaacactccgcacggtaaaaacgtgcgtaggcgaacaattctgccgcttcggcacgcaagactccatggcactgggcattgcgcttgagaaaaaattcgaagggctcaatacgcctcataaggtcaaaatggccgtgtccgcctgccctcggaactgtgcggaatcaggtattaaggaccttggcgttgtcggcatcgacggaggctgggagctttatgtcggcggaaacggcggaacccatttgcgcgccggtgatttgctgatgaaagtaaaaacgaatgaagaagtcttagaatatgcgggtgcttaccttcagtactacagggaaacggcaaactatctggagcggacatccgcatggcttgagcgcgtcggtttatctcatgtccaatccgtattaaacgatccggaaaaacggcaggagctcaacgacagaatgaatgagacactctctgtccacaaagatccgtggcaatacttccttaaagataaaaaagcatctaaagatctatttgaaaatgtcgtcacgacttcataaaacagtaagggggaacggacatggttaataaagatatgacaaaggtttgcataggcaaagtaaacgaattacctgaggagttaggaaaaaccgtatatatagaagataaagagcttgccgtatttaagctttctgacgggagcgtccgcgccgtcgaaaaccgctgtccccataaagggggcgtcttggctgaaggcatcgtcagcggagaatacgtcttctgcccgatgcatgactggaaaatctccttagaagacggaaaagtccaagagccggatcatggctgtgtcaaaacatacgaaacactgattgaaggagagaatgtatacctcctgtattgagcaaagaccggatcactttttcaagtggtccttcattttttaaattgctgaagggatgacgccatcatgaaaaacggaatcgtatattttgtcggtgccggaccaggagacccggggctgatcaccgtaaaaggaaaacaggctctggagaaagcggatatcattttgtatgaccggctcgcaaacccaaagtttcttgaatatgcctcaccggactgccggttcatttattgcggaaagctgcccgaccgccattttatgaaacagtctgagataaatgccctgctgattgaaaaagcggcggaaggctgcaccgtagtccgcttgaaaggcggagacccaagtgtgttcggcagagtcggcgaagaagcagaggcgcttcatcagcacggcatccgctacgaaatggtgcccggcatcacctcgggaatcgcagcgccgatgtatgcgggagtccccgtcacccatcgtgatttcgcttcgtccttcgcgatgatcaccgctcatgatacatcattgcacggcaggccgaatctcgactgggaagggcttgcccgaagcgttcaaacgcttgtgttttatatgggcgttaaaaacctgtcatttatatgccgtaagcttacggagtacggtaaatccccttccgttcccgtactcgtcattcaatgggggacgtgggggcggcagcggagcgttaaaggaacgcttcaggatatccatgaaaaagttcaaagccaaaacatcaccaaccctgccattatcgtcatcggtgatattgtcaattttcaaacacacagctggtttgaaagcaaaccgttcatcgggcggcatatcatggttgtcactcatggcgatgaagaacatacattgacagacaagctgcgcgagtatggcgccgatgttattgagtggccgaagcggatcgttaaaaaaatgcccgcaaacgaaaacatcctgaaacagatcagcacctttgaacaactatttttcacatcacgccttgcggtatgcgaattctttgacacactggctttcaagcagatcgacatccgccgggtgaccgcaagcctgaatgcagcgactgagaccgcaaagacggaactgacaaaacggggctttctcctatccgaatgtcaaattgattctccgcattcactcattgtaggaagccgtcaagcagcagaaaacttgtcagactcaaaatcatgcccgttttatatcacccatgagcatatcgcagatgagcggttcacttccatgatcgaacgcacgatcagtgagtctcctctgcaaatgattatctgtacgggcaaagaatccgctcagcatttgatcagcgccggaaaacaaatcggcatatcaccggatccatcggcaaaccgccctcccgtcatctgcatgggtgaagacattcccgccggctgcgagtttaccgccgtgaaaaatcaggaacagttatttgcgtttatacgaaatgaaatgaaagacatgctcgttcacagctgatacgccggaatgcttttctgacccccaggctcaacatcgggggtcagcccttttttattgtgtcaccaattttttatgatgagtcgaatacatcgccatctgttccgcctgcgggtccaaataggctttggcgctgttcacggcggtcggcccctccgtgaaaccgcctgcaatcaatctgagcttgctttcataatgggcggcgtcaccggcgacaaacacgcccgaaagattcgtccgcatatgtctgtcagctttaatcctgccttcttctatctcaagcccccagtccttcatcggaccgagatcaattttaaacccgtggttgataatgagctcatcaagcttgatgacttcagaaagtcccgactcagtttggcaaacggtgacgctctcgatccgttctccggtgccgttgagatgcttcagacgatatggcgcaagcacccgcacggaagaccgcttcattttcgccacgctgctttccaaaccgccgaactcctccctgcggtgcaagacggtaacagacgccgcaatcggttccagctcattcgcccagtcaaccgcggtatctccccctcctgaaatcacgacatgcttatctcgaaacgcatcaagcttctccaccttataatgaaggttctttcctgaataacggctcgcatccgcgctgtcaagttcattgacctcaagcgttcccatgccgacggccaaaatcaccgtgcgcgtatagtgcttttccccttcggaactttcaagcacaatggttccgtcttccagccgttcaaatccggtcacccgctgattcaacacgatatccggctcaaatgtcgccgcctgctccttcagctgcttaatcagctgttctccggcaatcccgggtattccgccgatatcacggatgattttttcagggaaaaacatagacactttccctccgagccgcggcaaaaactcgatcactttcgttttcagctcacgcatcccgcaataaaaagccgcaaacaggccgatcgggcctccgcctataatcgtgacgtcgtacacctcatgattttccgccatcgttctgcctcccgtttatatctatacttcataaatttttaattgagaatcaatatcaatgaaagtataacacatattgaggatcagtgtttattcatttctcatcttgcgggaaaggagtgattcagaagtgaggttctgagattgataagcgggaaggtattaaaactgaaaccagtacggcgactggtttcttttttatctctttttcatcagcatgatatcgagatacagctggcaccttgtcctgaagtcgtttaaattaattgatgtcatgtcaagaatctgtttgatacggtagttcaatgtgttttgatgaataaaaagctgttctgcggctggttttgttttgcagttattgaggagatagatttctaacgttttcagcagttctgtactgctttctctgtctttggcttttaataacgctaaatcattgtttacatattccagtgaggcgtttttttcttcgatactttcaagatagcggtaaatcccgagcttactgtattcgtacgggatattttcctggtttccggtaatttcggcggcctttatgacttcaagggcctctatataacttttgccgagcttcaggatgctgctgtattcattgccgattccgatatagatgggagtggggatcttctgaaagtgaaaatgagtcagcagtttgtggatgaattcagatgctgccgaagtgccggagcttttttgcgagaagcttgcgacgacgatgacaatattggaatcaatggttaagacgtgactgactttatcccgcaaattcaagtacgatttgatgttttccttcacatcttcgactgcctccccatccccatttgcggcgtgcaggacgactaccgaaaaaaccgatggcagcacggcgttcatcttttccgcttcccgcctgaactccttttcagaggagaattgctgaaagatcgcccgtttcaccaggtcttccgctctctcttctttttcctgtttcagccggttcgttttatagatgatttttccgacatggaatgaagtttcatataaaaaatcgagctcctcgtccgtcaagtttcggtcgagctcctgaatccagatgtagcccatcacttcgcctttatgttttgcgcttacaaccactctctgattcagtccgatactgtctattttttcgacacggaacggttcaggaacggttttcagcttttcgatcaccccgtccttcagaaacctttcaaaaatctgcacggggcatttttttgaaaatatcgtctgctggttggcggagtcgaagtgattaatgtaataagaattataggcaagcaaaaagaaatccgcgctttccagaataacgggcttctgcaattcataactgatgaaatcaattaatttatcaatgtccgtaaatgaaaaaactctctctaaaagctcttccatacctatttctcctatgctctttttatctttatcatactctgcggggtgactttttgtatagaaaaaaattcacatattcccaaaacggcatgatccgaaagcctgtatcgtgaaaagaggaaaaagggcggtcccttcttcctctcgttccttgcttttattgagaaagtgtatcaccgtactcatgaaactgatctgtgacatcttttgacggagcctgtgtcaataagctgacgacaaatacagcggcaaggcttacagcaaagcccggaatgatttcgtacaaaaagtctgaaagaccggcattcgcccaaatgattacggtaatcgctcccgcaatcatgccggcgagtgccccccatttcgtcatccgtttccaaaataaactgagcagtacgaccggcccgaatgaagcgccgaatcccgcccatgcatagctgacaagaccaagtatcgtgttatttttctcccaggcgagcaccaaagcgatgattgacaccgcaagcactgccattctccccagaaatacgagttccttatcagaagccgaacgcctgaacatggacttatacaagtcctccactaaagaactggacgtaacgagcaactgagacgaaatcgtactcataatggccgctaaaatcgcagaaatgagaaatcccgtaataatcgggtggaacagaatgttgccgagctgaataaaaatggtttccggatcagccagcttcagtccgttctggtggtaatacgcgattcccgcaagacccgtaaacagcgctcctagtgcagacaaaatcatccatcccattccgatccgtctggcgcgtttgatttctttcacagacgtgatcgccataaaacgcacaataatatgcggctgcccgaaatagccgagcccccacgcaaataaagaaataatgccaaggacggtcgtccctttgaacatgttaaacagttccgggttgacggaacggatatcggcaacggtttcccccgggccgcccgtatggaaaatcgtcacaatcggcacaagaataagcgccgcaaacataatgatcccttgaacaaagtccgtccagcttaccgccaaaaagcctccgaacaaggtgtaggcgacaacgacgcctgtcacgacccacagccccgtgtggtacttcaaccctaaaatgctgttgaacaagacacctccggataccatgccggatgatacgtaaaatgtgaaaaagacgagaatgacaagacccgaaaacagtctgagaagcttcgtatgatcaccgaaacggttttcaaggaaacccggaatggtgatggaattccccgctttttcggtatacgttctcagtctcggcgccacgaaaagccagttcgcccacgccccgagcacaagcccgagcacaatccaagcgccgcttaatcctgtcgagaacatagcgcccggaagccccatcaagagccatccgctcatatccgccgctcccgcgctgagcgctgtgacggcagggcctaaagaacgccccccgagcatgtaatccgtcagatttgacgtccgtctgtaggcgaaataaccgataaacagcatacccgccatataaatacaaatggaaataatcaactgaatgtttgctatggcatttcctcctccgctttatatgtttatggtgaaatggacaccccccgcgaggaggatgcccattcagtccctcttaaaacgtttcactgattgttttcgcctgcatgtggagggccaaataatccgggccgcccgcttttgaatcagtgccggacattttgaagcctccgaacggatggtagccgacaatcgctcccgtacaattgcggttgaagtacaggttgccgacatggaattcctgtttcgcccgttcaatatgtttgcggttatttgtaatgaccgcgcctgtcaaaccatattcagtattgtttgccacttctaaagcttcatcaaagtttgacactttagaaaacgccacgacaggcccgaaaatttcttcctgcatgagtcttgctttcggatcaaggtcagcgaagatcgtcggcttgataaagtagccttttgaatcatctccggtgccgccgcttactaaacggccttcttcttttccgatttcaatgtagctcatgatcttgtcgtaagaaccttggtcgatgacaggccccatataaacatctgcactgtcaggtttagcagttacttttgattccgtaatttcaatgacacgctctaatacttgatcatacactttttcatggacaactgcacgtgaacctgcagaacatttttgtcccgcgaagccgaatgctgatgtaaagatggattgagccgccaattcaatgtccgcatcttcgtcaacgacaaccgtatctttaccgcccatttctgcaatgacacgttttaaatgctgctggcccggctgaactttcgccgcgcgttcgaaaattctcgtaccgacttcacgtgatcctgtaaatgtgataaggcttgttttcggatggtcaacaagataatcgcctacttctgctccgcttcccggcacaaagttgactacgccttttggcaatccggactcttcaagcacctcaacaaattttgctgcaataacaggtgtagcactcgcaggttttagaaccactgtgtttccagtaacaatcggcgccactgttgttcctgccatgatcgcaaacaagaagttccacggcggaataacaactgtcacgccggtcggcgtgtacacatattggtttttctcgccctcacggctgttgaccggtttgccttttgccagttcgatcatttggcgtgcataatactccatgaagtcaatcgcttccgccgtatccgcatcagcttcgttccaaggttttcccgcttccttgacgagcagggcggagaattcgtgctttctgcggcggactttggcagctgcgcggaacaaaacggccgctctttcttcaggggatgtgtatctccactcttcgaacgctttcgcagctgcttcaatcgcttgctcagcgtgctcctgggacgcctttgacacttttccgacgacttcttctttatcagccggattgattgaaacgattttcgcttccgtctctaccttttcaccattgatgacgagcggataatcttttcccagatactcatttaccgtcgcaagcgctttcttaaattcttcaacgttcgattgatcttggaaattcgtgaatggttcgtgtttataaggtgtagtcattgtcatctctcccttttttacttcttagtcattcctttaaaggcgaatgcgatgtttgaggggcgttcggcgagccgtctcatgaaatagccgtaccagtcatccccgtaaggcaggtagactctcatgcggtatccttcttccaccaggctgagctgggtttgcgagcgcatgccgtacagcatctgaaactcaaaacggtcgtttggaatgccgtgctctttggcaagctgttttgtaaactcgatcattttgtcatcatgcgtggcaactgccgtataatgtccttttaaaagctgtttgcggatgagtcttttataattttcatcgacgtcgcttttttcaggataggccaccttttccgattctttataggcccctttgacaagccgcagaaacggattcagcgggctgaggtcatcaagatccttctccgttctgtacagataggcctgcaccacggtgcttacatattcataccggcttcggaagtctttaaagatatccagcgtcttctggcatctcgtttcatcttccatgtcaatcgtcaccatgactttatgtttttcagccgtctggaggattttcgtcatattttcatagacgagatcgagatctatatcaagacctaaagacgtcatttttaatgacacttgggaattcagctgttcatcagcgattaaggcgatggtctgcatgcactcctcggtgcgttctttcgcaacatcaccgctgttgacaaattcccccaaatgatcgacagtaactgacagcccctggctgttcaaatgtcggattgtcgggatagaactgcggaaatccattcctccgatgattttgccggctgccacacggcttccccagcttcgcgccatcttattgagaaagctgctcttggataaaaataagaaaaaatctcttgtaatcacttccaaccttaacaccccgcaatctaagaagtatttgtatgagtctattgtaaatggacaaaacatcctctcacaatattctaaaaatacaaagattctgataaatttttgtggttttaccacaatcagcttcttagatagcaggcggattatgccgaaaaaaggcggacggaaatgacggcaatcgtcaatttccgcctttttccccccacgcctcttcgacggtctgaatcaatagccgattcagttcctccgttatgtcatgtttcggcgttttgatcgttttgacatagtgcccgattcgttctatttcttcttctataaatgcatgaatgatcgtatttctcggttccggagccagctcctgaccgctttttttccttgtaagcagtgtattgatttcagaaatgagcgcttcatccgtcaataaggaatcggccagtacgggaaatgacatcggcggtacggagccgaacgtttcaatccatctgcaggcaaggagaggacgcagaacataaaaatactttttaatcttcacttcactgccccgcaattccgttttttcattccgttttgccatattgagataatgatagatgccggcttcaggcgaaaaggcgcggattttcagttttcgaagcttttcagccgctgagaaagcttcataatagatcatctcagaagagagccattccaaaagaggcggatttgattttttaaaaagctgcagcgcttttctcagttcccagccgctgatgtcaagcatgtcatgaatcggctcttctatgacatccctatgcggttcgatcgaaaagtaccattcttttttcggcacatagagaaaccgtacatcatagtcgctgtcgcttgacggaaatccccatgcgcggctccctgattctacggcgtaaagcaccttgacgccgtgctgtgcttcaattcgttttaattcttcgatgatcctttgttccatctgtatccgtccttttccgtgatcattcctgaaaaaagcccgagtacttgggcttttcgctgtcgtcagcctttcagatgcgctttcagaaaggccagcttttccgtatggaaagaaggtatgtattcatgtccgaaataccggtaaaccttcaattctttttccgtttccagatgattgtacgcggcaaacaccgtcgacggcggggtcacgcggtcaatcagcccgatggacatgagcaccggaacttttacgcggtccgccagattcatgatatcaaaataggccagtgtattcatcgcggccttctccgtttcagggctgccgttctttctgaaaaaggagttaatctcaagatacggctcatcaagagcgacatcaatggcccgctcaaaattgcttaaataaggataatcggccgcaaccgctctcggaatgtcagatagtgccgccgcggcgattgaaagtccgcctccctggctcccgccgatgacggcgatcctcgtttcatccacttcatcaaagccgctgatgacttccaaagcccggacggcgtctaagtacacgccgcggtaataatatgtatctttatctaaaatccctttcgtcatccagccgggaacgtgtccgtgcggtgagacgcttgtatctgtgctgctgtgctggccgcggacaagcatgccgaacgcggcatatccgtgaagcgcccaatttacgatgtcatgtatatccccgtcatagctcgcattatagccgtgatatttcacgatggccggatgcggtccttgccggtcgggaacggcgtaccatccctcaatttccgccttgccgaagcttcggtatgtcagccggaatactttcacgccgtcagccgggtagctttcagcctttaattcaggctttgcctcttcctttgcaagctcatgtaatgatgatgcccaaaaatccgaaaagccatgaggagcggttttatttggtttataggtttgcagttggtcgagcggcaagtcgtataattgcatatccgattattctcctttgttttatatgttttaattttctgactctatcttaacacgattttacactcattttctaaacattttaataaacgtttgtttaaaaacaaaaaagccgtgcgctcacagcgtcacggctctttttacatcggctgatacaggtcccagccgatttttaacgtttctacgatataatcggctatttcttctggttccagattatccgtcgccacttttgaattatgtttatcatagatgctttggcgctcgttaaagagctgctgcatttcatccatggaacggttatgcagaacgggacggctttcaatcagcaggtcagcccgctgcttccaattctcccatgataaatcaagatggagcacgaggcagttttcaaggcagcactgtctgatttcctcttgtttaaacgaaccgcccccaagcgacacgatcttgaatttcgtattgcggcagatatctaatatatagtccttttcagtctgacggaaaaaggcttcaccttttttctcaaacatttcagggatggacatattgaaatctttctcaatctgcaaatcaatatcaataaagtctctgtataatttcttagcgaccagctggccgattgttgtctttccgacacccatgaatccgatcagtacgatatttctttctcttacgggaatggcacgttttgcgttcatcttcggcgaaatcctcctaagaaatgaaaaagttatgtttattatatgataactcaatattgaaatatagagataatgcaatgaaagaaaacccatcctttataagaagagatgagtttttctttctatcggagcttaatgcgttccacctttccgacaatgaaaatataagaaaatgccccgataaatgcgacagcgccgacaaacagaatcgctccgttatatgaaccggtcgcagaaacgataaacccgatgagaagcggggtgataatgccggccatattggcgaaaaagctaaagacgccccctgccaatccgattgtttcgcttggcgcgacctcactcagcatcgtccaggatatattggacatgccctgcgcaaaagaagcaatggataagatcgtcaaaaccgcaggagcagaatccgtaacattcgcgagcacgatggagcctgtcagcagaagaccgaggatgacgggcgttttccgggcaacgttcaccgacaccccccgtttcatcatgccgtcagaccaaaatccgccgaacaatacgccgaaaaaagcggcgatatacgggattgatgcggcgaagccgacttttaagaaagccatgtgctttgcctccgccagataagtcggaaaccatgtcaaaaagaagaacagcgtggaggctacggcgaattggccgatatacaatccgacaagcttgcggtattttagaagctggacgaaatccgcccacgatatcctgccggctgaatcagacacctcagtcagtccgccgccttctttaatataatcaagctcctcacgattcactttccgatacccgttcggctcgtgatacattttaaaccagaaaatggagaaaacaattccgagcacccctgaggaaataaatacggcgcgccagtcaaatgccgttaacacccagaataaaaccggtgtggcaaacgccagcccgacatattcccccgccgtataaacacccgtcgcaaaggcgcgttcccgccttggaaaccatgtcgtgacaatccggttgtttgccggaaacgccggcgattcagctatgccgatgagcaggcggcagccgaatagaaacccgaaacttgtcgcaaaagcttgtactccggtaaaaaccgaccacacaaataaagaaattccgtatgtccgttttgacccgaatttatccaaaatgagcccgcctggaatctgcatccccgtataggtccagctgaacgcagaaaaaacgatgcccaaaagcgcggggcttaggttcagcgaatgttgaatggatgggccgacaatagatacactggctcggtctatataattaatcgcagtgataaaaaacaaaagaaccaatatcacataacgagcgcgagtcggtttattgcggacgggactgaaggccctcagctccgtttcttttttcaatggcttctccccccttactcgaatgaaattaattgtacaacacttcggttaattatttaatactttgacgcaaaaaagcgttaaacaatttgtgtgccgcactgacctgatgcagacacaccccgcttataaaaaagtgtctgcccttttcacctgtttatccgtatcgcacccggggaaaaagtacacatatgatagacagttacgggaggattatcgatgaaactgagtttttgcacgacaggatgtaagaaaaagcatattttcgacatcatttctttcgcgaaggagcactcctttgagggaatcgaactgtggtacggacacgctaaacaatatatagaggaaatcggcccgctcgacaggctttatcagcagcttcaggaggaaggcatcggggtgcctgccgtcagtttgtacactgacttcgccgctcaggatgaaaggcaggcgttaaaggatgttcaaagggcattaagcgcggcacgacagctgcacagtcccttgatcagagtctttgccggcaatcttccttcgcaccggacgtcaccggaaaagtggcaacgtgcggttgatcaatttcagcaggcggcacggctcgcagatgactatgaagtcgatatcgggcttgagattcattacgatacgtacgcggatacaccggaggcggcgctggcatttttggaggatgtcggacatccgcgggtccgcaccatttttgacggctccaacctacacgtcaatcacgttgaccaaatgtccgctttggaaaaactgtatcataccgtcagccacattcatctgaaaaactatcactgggattttgccaactggtatctcagcaagccaactccgatttttcaaggagatatcgatcaaaaagcatttttaaaagagctgatgaacagacaatatgacggttttgtttctcttgagtattttggagaacatgcctttacgcatataaaggaatcgctccgcgaatatacgtctgttttttcccgctgactcttcgatcgaagggtctttttttgtatcatataaaaaaagggggatatcatgatgatcatttggataaatggggctttcggttccggaaaaacacaaacagcgtttgaactgcacagaagactgaaaccgtcttacatatatgatcctgaaaagatggggtttgcgatgcgttcgatgataccgccggatatcgctgaagatgactttcaaagctaccctctgtggcgggaattcaattacagcatgctttcctatttgtcagatacatatcagggcatcatcattgtgcccatgaccattacgaacgttcaatacttccatgacattatcagcaggctgagacaggatggccggaccattcaccactttaccctgctggcttcaaaggaaacattgctgaaacgcctgcgcaccagagcggaaggaaaaaactcctgggccgcaaaacaaatcgaccgctgcatcaacagcctgtctgatagcctcttcacagaacatctccatacagaccaaatgtctattcagcaggtcgcagaaacgatcgctgcccaagcaaatctgcctcttaagcctgattcgagaggcagccttcgaagattcaccgacagattgatggtgaagctgaatcatatccgtatcaaataaaaaaacgttttgaaaacatgttcctgatccatgcaaatggatcaataaataaaatcccctctgaagggatgtttttcaaattaagaaaaaaattttagaaataaagaaggaattttatggataatcatctaattattaacactgtaacacattttatttgaaaagggagtgctcgaaatgaatttcaaaaaagtgttaaccggttctgcgctgtctcttgccttactgatgtctgccgctcctgcctttgccgcatcaccaacagcatccgcatccgcggaaaatagcccaatctcaacgaaagcagatgccggcattaatgccatcaaactcgttcaaagccctaacggcaacttcgctgcttctttcgttttagatggaacaaaatggattttcaaaagcaaatactatgacagcagcaaagggtattgggtagggatttatgaaagtgtagataaataaaaatgaaataaacaaaaaacctccctttcaaaagggaggttttttttattctatttccaccaatcatcaaacatcgatgccggcacctggcgcttatgctccgtactgaggtagcgtttttccagcgcttcaatcacttcggaagaaacatccttgccttctaaataatcatcaatgtcattgtatgtgatgccgagttcggtctcatcagtctgctgcggtttttcatcaagcagatcggccgtcggtaatttcaaatacaggcgttccggcgcgccgagctcttctaataaacgtctgccctggcgtttcgttaatccggtcagcggcagcagatcagctccgccgtcaccgtatttcgtgaagaaaccggtcaccgcctcggccgcatggtcggttccgatgacaagcagcccctcttgtccgccgatggcatattgagcgatcattctcattctggcttttacatttcctttgttaaagtcagacagctgatcgcccgtgtcttttttatactgatcagcgaacgcgctgacagcggacttaatatcaaatgtccatgatttatcaggtttaatgaatttgagcgccaattgggcgtcatcctcatcttgctgtgtgccgtgcggaaggcggacggcgataaattcagcgtttccgccttcttctctgatgctttcagccgccaactgggcgaggcgtcccgcaagcgtggaatcctgccccccgctgatgccgagcacaaagcctttggcacctgtttttttcaaatattgtttcagaaagttcactctgtcctcaatttcttgtttcggatcaattgagggctttacatggagatcattcataatttgtttctggatgctcatcccaatcactcctcctgcattgtttctttatgatccatttcccgttcatgctgaaaatgaatcatgccactatgtacgactctctgttaaatatagcacaggtgcagattttaagtgaatcaaatacaccgggatcagctgatttccacccgcagcgccgtgatgctgtctccgttgcattttcctttttcaatcggacaggatgaaaacgcgacgacgagatccatttccgcacggagccgtacataatcacccgcgtcagaaagaggcgtttcgactgataagttccccttctcatcgagcaccgtgttcataaagatggcaaatgggtaatgcatatgcggccgcggcaccccgaacgcttcaagcgccccgctcatattgtcatagcacgtatcctggagctcgtctttatgctttccgtataaaagcctgttcatatccggacggcaggcgggaagcagcaggtcatgcttgccgactgtatcctcaatcagcgtcagcatcggcttgtataaattcgaataaatatgatcacccgtttttacatgaatggactggttggcatcaatcgtcgcgccctgatcaagatgttcataaaagtccttggcatgatacgccgtaaaatcagccacctgctgtccttccacatcgactacttttataatctgccctttgtgaaccttcaggccgagcccttttttcggcggtacaataaattgctgtgtcatcagactgctcctttttttcttctattatgaaccccggccgtttgtttcatgtaaagcaatttattggatgtatattccccttctgacggccgcaatctaagctttgataaaggggttgaacttcatgggtaaatcacaggaccagcctaaagggaatctcgcttggtggcagctctccttaatcggcgtcggctgcacaatcgggacgggattttttctcgggtccagcatcgctattgtcaaaagcggatattccgcgctgatctcatttcttattgccgggcttggcacctattttgtctttgagcagctcgcgaagctctcggccaaacagcccgaaaaggggtctttttgcgcttatgcgagaaaggctttcggcacttgggccggttttagcaacggatgggtgtactggtcgtccgaaatgctgatcactggaagccagctgacagcgatctcgctttttacgaagcattggtttccgaatgtgccgctgtggattttcgcctccatctatgcggtgctcggtctcttgattatatttacggggctgtccgtttttcaaaaaacggaaaatgtgctcgctgttgtcaagacggcggcgattgttatgtttatcgtcatcgccatattggcgctgtgcggtatattttctcataaaccggatgtgcaggtgccgaacgaatcaaaggatttgttcccgcacggagcgatggggttatggaccggattgatttatgcgttttacgccttcggaggaattgaagtcttggggctgatgaccgtgcatttgaaaaagccggaggaagcctcaaaatcaggccggctgatgcttgccgttcttgcggtgatttacgtcatttctctcggcctggcgctgctgttagtgccgctgggcaaattcaccgaacaggacagcccgtttattacatcgctgaagggttttcatttagatatcattcttgatatttttaacgggatttttattattgcgggattttccacgctcgtcgcctcgctgtttgccgtgacgacattgctttgtacgatggcagatgacggagatgcgccgaaatgcttcagattaaaggaaaacaaaaaaatctgctggcctgcgctcggattgacgtttgccggactcatcgtctccatcatcctgtcattggtgctgccgaaaaatatatatgaacacatgacgaccgcggcgggcctgatgcttctttatacgtggctgttcattttgttctcgggcaagaaactgctcgaaacgacaaagatgggaaccgtacagattgttatcgcccttgtgctgattgtcgcggccgtctccgggacgctgtttgagaaatcgagccggcccggttttctggtcagcctttgttttctcgccgtcattgcgatcgtgacatggatcgtacaaaaaaagcagggacacagccctgccggatcatagcttatttcgtcggtttaaacagtctcttcaaataagaaaagggacactttgacacttgcgtctcatcatcacggaggaaatattgcttccattctaaattgtcttttcctccgtaccaccccaatcggggatgaagaggggcttcatcatacgcctctaagcgttttctgatcagccggctcatgtttcgtccgaacgcggttgaatcatttaatccttcgaaaacccatctcggctgaaacgcgagcataaaaaacgggaagcttctgctttgtctcgcttcatgcgcaggcgtcgcgcacagaataaaatacggctcgccgtcaaagcagaactcccatttataatgttcagggtcttccggtatgtcttccggccagtctttcggatcgcagccgctcagccggtttaaaaaagaccagaacagctcttcatacgcctcaatggaataatactcagctaaatcctcaggcgtatcaaaaatcacaagcagcgacgcgtattttccggtattccttgagatctttccgtactcggacagcagtagtcccacttcctccggggttccctcttcgcggggatcacccgcaaaggatatccggagctgatctgtcaaaaatccctgacgtccgggaatgcacggaaacgcgtccgctttatcgcctactttttctgatagaagctcaaaagcgattctctgccaatttggcagatccaataacttttcctcaaggcaactttttgtgtacagctcgcttgccatcggcccacctccagtatcgtcatgatacgttatgatggagataggcgatgggtgactcttctatttatgagatgagcatttgaatcccctgccatccgaaataaaacccgaaaacgatcaaagacacacccgccgctcccgtcagccagcggagcgctttttcatgaaggagatttctgaaagtgctcgcggcgaccgccatgcagaaatcccagatcaaaatgccgagaagaatgccggagctgtaaatcaaaagctgatttgcatcgaaggattcagcggttttagcgaggatgctgccgtatatgccgagccagaataaaatgctcagcggattggaaagagaaataaaaaatcccgcgccgaatgttttgtaaaaagccggttttccttttccgcttctgacattcatggcttccctgatattttttagcgtttcgactcccgtataggtcagcacgaaaaaaccgaagagccacaaaaacgtttttacaaaaggagcggtcaaaaattgagacagcccgaaatagatcagaatcatatacagcccatccgcggccatggcgccaagaccgaaaatccatgcatgccaaaagccgtttttgatgcctttgtcaatttgcgccgcattgaccggtccgacaggtgctgacaatgacagcccgagaacgatgtagcttaaaaagatgttcattgacttccccctcattcatgcaacttgtacaagttattcatgaatgggccgtgctatgatatattattttaatttctcaagctcgtcttccatcatgtccgtcgcttttcctaaaaaatcgaatatcagccgcagttcttcttctttatattgtcggcaaaggctgatcgtagactgggataaggagctgaacaattgcttcacattcgcctttccggctgtcagcggcacgataatcacccgacgtttgtcttcggggtcttttttcctcatgacatatcccgctttttcgagccggtcaatgagcgccgttaccgaacctgtgctgagaccggtttttttcccaagctcgcctgcggtcatcgggcctgcttcatttaagatatcagctgattttaaatcggttggaaacagaccgagagattgagcggccgcctgatgaaacaggatcgtccttgtggccatctttcggaataactgtatcgcggtttcctccgtctcgcttctggtatttcttgttgacaactgacaggcctccctataaaatcaatttatcttgacgatcaagataattttcggcaaatctaatatgatcatagcaaatttaatgattaaaagtaagtatgggaggaaaaagcatggaacaaacagccgcgaaggacgcctcgacgaagtttgtcgtcatcggtcttttgctgggcattttaatgtcggctatggataatacaatcgttgccactgcgatgggaaatatcgtggcggacctcggaagtttcgataagttcgcgtgggtgacggcatcatacatggtagccgttatggccggtatgccgatttacggaaaactgtccgatatgtacggacgcaaacgtttctttttattcggtcttattcttttcttaatcggatccgcgttatgcggaatcgcccaaacaatggatcagctcatcatttaccgcgtcattcagggaatcggcggaggcgcgctgatgccgatcgccttcacgatcatttttgatttattcccgccggaaaaacgcggaaaaatgtcgggcatgttcggtgccgttttcggcctgtccagcgttctcgggccgcttttaggcgcgctcattaccgactccatcagctggcactgggtgttttacatcaacgtgccgatcggtattttatcattgttttttattcttcgttattataaagaatcccttgaacacaagaagcagaaaatcgactgggccggcgcaatcacgctggtggtttccattgtcggtctgatgttcgctcttgagctcggcggaaaaacatatgattggaactccgtgcagatcatcggtctgttcgctgtgttcgccgtgttctttatcgccttttttattgtggaaagaaaagcggaagaaccgattatctcattttggatgtttaaaaaccgtttatttgctacggcacagattctggcgttcctttacggagccacgttcgtcattttagcggtgtttatcccgatcttcgttcaggctgtgtacggaagcaccgcgacaagcgcgggctttattttgacgccgatgatgatcggctctgttatcggaagtatgatcggcggaattttccagacgaaagtgcggttccgcactttaatgctgatttccgtggtcgctttctttatcggaatgctgctgctttccaatatgacaccggatacggcgcgtacaatgctgacggtattcatgctgatctccggattcggtgtcggcttcaacttctcactgctgccggccgcgtccatgaacgatctggagccgcgttaccgcggaagcgccaactcaacaaactcgtttttgagatcattcggtatgacgctcggtgtgacgattttcggaaccatccagacgaatgtgtttaccaataagctcacagattcattcagcggcatgaaaggagcgggcggcgcgatgcagaacatcggaaatccgcaggagattttccaggccggcacgcgcgcccatattccgccgcacattctggatcgcattattgacgccatgtcgcaaagcatcacatatgtatttacgcttgcgctggcgccgatcgtcattgcggccgttaccattttgtttatgggaaaagcgagagtaaaaacctctcaggaaatggcgaaaaaagcgaattaaaaaaagcagtacatggcgtttgtcatgtactgcttttttgtttactctgcgaaatgcggagcgagaatatctttcagcacgtttgcgctgcggctgaattgagcctgttctgtttcattcagctcaagttccgtcacacctgcgatgccgttccgattgacgacggccggaacgccgataaagacgtcgtttacaccgtattggccgtccagatatgtgctgacggttaaaatgctgttttcattacgcaaaatcgcttttgtgatgcgggcgaggctcatcgcgactccgtaatatgtcgcgccttttttctcgataatatggtaggccgcgtttttcacatcgtcaacgatctgatccagctcgtcctgtttgtaagctgcatttttctccagcaattgctgcaccggcactccgccgatattggcgtgactccatacaggaagctcggtatcgccatgctcgccgataatgtgggcgtgtacgttttgcggagcggctccgaagtattcgctcagcatataacggaatcgcgcagaatccagtgtcgtgccgcttccgatgacgcgttctttcggcagcccgctgaatgtccatgtcgcataagtgagaatgtcgaccgggtttgtggcaacgaggaagatgccgtcaaatccgcttgccattacttcaccgacaatgcttttaaaaatggcgagatttttttcgaccagctcaagtctcgtttcacccggtttttgattggctcctgcacagatgcacacgatatcggcatccttacaatcctcatatgtgccgtaagacgttttgaccggatgaggcgcaaatgctcttccgtgatttaaatccatgacatctcccatggctttttctctatttacatcaatgatcacaagctcatctgtgatcccttggttaattaacgcaaatgcataactgcttccaacaaaacctgctccgattaatgctactttgttcactcgttcgttcatcatgtatgctcatcctccagtgtttcgtggtgtctgtttttatcttgtgaagtatttcacatttatattgtgcaacacttcacaaacttttgcaagagaaaagtttgatttttgaacaaaaaaatatcggtgatggtttccagattgttgacaacatcctaaaacggaaccgttttaggatgttgtcatcttttcagcgtgattgaagacgcgctgtccctttcccagaagcgggggtttgccggcacgctgatgtgatgatggccctatccattaatgcggaagataaccattcaaaccggagttgttatacaaaccattctgcacataatcaaagccgggctggttctgtccgggcacttgggcgctgccattgttaaaaatcactttggcattggccgtatccgtattcgcaggcagcgtcagcgtgtacattccatttgcattcttagtcattgctttccccggccacgatccggttaattctatggccctgcctccatcatgtttatagatataagcatttacctggccccaatggtccgggttttgatagccaatgatgttggtttgggacgggtcttttttgacaaatgtgtattcttgggttctcgctggaccctcgccgttcgttccggttaatttgatgttgtatgtcgtgccgattggatctcctttcccgatcgttagtcggtctccatccttaaatgctgtctgctgcccattattgatttggtaaacggcttttgttgttttcgcatttgcacgcagggtgaccgtcagctgatcattgaaagaatggactgcccccgtttggtaattctcaagaaagacatgaggcgtatttccaatatcatcaggataaagaacagccgccgatctggcattgatcgtacctgtcagtttgccgttcgctacttgaaatgaaccggcgccggccctattatcatacctgccgtcaggtaatttcgctgaagtattgatggtgacagaagaggatcctgcatttgccagcacaacgccttttgagccgcgctgattcataaagatttggttgttcccattcggattcgagagttcctcaggctgcccggccattacattgtgaaatgtattgaccgcagtaatcgcctgatctttaaataaggcgctcccgcgatctcctatttgactttttccgggaaatcttacaccatttcctccgccctcaggtctggaaaagaaaagaggcgtgcttcctgagcgggaaccaatcactgcccagcctaaacgaatatcgtcatcactcatccatgtggactcttcatcatcattggcatacgtatcatgtgattccacccatgtgactaacttgtccgcagacacgtcagatgcataacgggagatattcgacacactcagattacggttctttaaagcggatctgatggaatgcccgtagttagaagccgtcacattcatataattcgcataagcagtatctctggacgcgctgtcttgcaggatttctccgtattggaactccgccgatgtatttgtgatattcggccaaaactggctgccgtaattcccatcatccggaagctctatatgcttggcggcatcatagcggaatccgtctgctccgtcattcaatgctctttccaagaaacgtttcagataggcctgcacctcagtattctgtgtattccaatcatacagcccaagcaaggaattttgagtgacgtcccatcgatccgaccaatttttaatttgtgtgtttccatgggtccagtttggaatacgcttaatctcgtcagaaatcgcgccataatcgctggtagtatgattgataaccgcatcgacaatgacttttacgccatacttttccgcggctgcacacatgtccttaaattcttgttcagtgcctaagtaacggttgccgatttggtacgatgtcggctgatacagccagtaccagttcctcatgcttttatctccttggttcccttcctttacttggttaatcggagacgtctgaatggctgcatagcccgcatcacgaatatctttcatattttgtgttaacgtattgaacgaccaattccatgcatgaaggatggtcccgtttttgaccgatgacgcggtcaccttattcgatttgtttgcagtttcagcgtttgcagccgccgggcctgacaaaaccaaatgaaacagcaataaaaatccggcgaataacggcagtaaagaggttttgaatcgtttttcaaacatttttgacactccttatttcatttttgaagactgactgcggagtcaaaaattcctcttactctttcttcagctcctttcaactgttgtgaagactggataattttgttaacgcttacatttcaacttatcacactctctctatcaaagcaacgtggcagagtgaattcaaatctatattcctatcaattaaaaagacttcccgctttcaaacaaaaaaagaaaccacctgtcaagatgatttcttttttatttcttttatcgctcttctgtaagacagcttcacaatgacataccgaagcagaaacagaatgcctccgcagacgataaaaagaaagatcattttcagccaagcaaagaatgtatggggaaaccccctgtcgtacatcgtaatcgccgctaccgcaaaagtgaccgcaattgaatctatccgctgctgcttcacccgcttttgcagttcttctttggtgtctattctcggcatgagcattcccgacgctcccgccctgatgcaataataaacaattataatgaagaaaaccgccaagctaccggcccattccctaaacggacagttcagaacaagtccgcgtacgatgatgtcaagcaaagacagtgtgcccacaagcattccgacttctgaccaaatcattcgttctttctctttcacactctcactctttccattcacgtttgaaagtctgttccgacgctgattcatgacttcctcccgtactattaagaatggcttacaactcccattatatcttgccgattcataatgataaaccgaaatatcattgacaaaaatgttaataagggccccaattgatcaggacgcctatgcagataaacacgagaccgatgacaaaccaaatcagcgccagcggaatcatgaagcgaagccactttacgtacggaatgccgctggcagccagtacggccatcagcacgccggaagtcggattgacacagtttacgacgccttctccgagcatgaccgcttcaaccgcgacctgtctcgtgatgcccatcagatcggcaagcggcgccaagatcggaataaatacgaccgcctcccctgagcccgatgaaatcagaaaatgaagcagggcgctggaaatatacattccgattgcgcctgccatagggctgaaaccgtccagcagtgacgcaagtccattgactaccgtatcaagcagctttccatgttccaggataacggaaatgcttctcgccattccgacgatcagcgcaccgtaaacgagcccctgacagcctgtaataaacgtttttgcgatatcatttgccgccattcccgcaatcagtccggacacgattgagataaaaatgaacacggcggccatctctgaatcagaccagccaagagtaagcgcgccgtataaaaagccggcaagcgacaaagccgcaacagccagaatcaatttatggcggacggtaaacgggacatgcttgtcctccggctcagaaacctgcgggagtgaacctgccgccggaaaccaatcgttccccagcagactggcgtcctttgcttttctgagttttctcgtataccgataaatatataaaatagatgataacagaaaacaaatgtagacggcaatccgcaggccgataccggaaaacagcggcagctccgcgatgctttgtgataacccgagcggtgaaggtgataaaatcgtcgcgttaaacccggcatagcagccgatataaatgacggccgccccggccacggcgtcccatttcagcgagcgggcgacgatcaggccgatcggaataaaaccgatcacggaattaacgacgatgccggttgtgccgaggatcgaaaatagagagccgacaatcgcaataaacagcagctgttttgtgcggaacgtactgatgacattactgatcaatccattgatggcgcccgttttctccaaaatcgcaatggtgccgcccgtaaacaggattaaaaaaataatcggcgcggaacttgtcatcccttcctgaatcgcggtaaaaaaagcgatcgggctgacaggagactggtctaaagaatgatagcttcccgggacggcggacgtcacactgccctttgtcactctgtcaaattcccctgcgggaacgatgtacgacgctatcgcgcatagtaaagcgacaatgaacagcagcacataagcatcaggcatcacaaacaatttcttctttttcaatacaggttcggccttcggcacagccataacatcaccatcccgctttaaatttataaactattcagaaaatacagatatgtgctatattatatacagaccgattgcctgttttcaatatcaaaaataaaaaacagacagcttttgaaggaggacttacggcatgaacagactcacagcgcatgaaaagcaagtcattatggatatttttgaccacctgcacgccaatcccgaagtaagctggaaagaatatcaaacaactgaatatctgactgaaaaactgaaagaggccggctgccggacccgcacgtttgatgattgtaccggtgttgtcggcgaaatcggagaaggctcgccggttgtggctgtccgggcggatattgacgcgctgtggcaggaagtggacggtgtctttcaggcgaaccattcatgcggacatgattcacatatgacgatggcgctcggcacgatgatgcttttaaagagtcagccgaaacttccgaagggcaccatccgctttatttttcagccagctgaagaaaaaggcggcggagcgctgaaaatgattgaaaaaggcgtactggatgatgttgatttcttatacggcgtgcacgtgcgccccgtacaggaaacggcaaacggccgatgcgcaccgtccattctgcatggctcaagccagcatatagaaggcctgattatcggagaagaagcccacggcgcgagaccgcatctcggccttaacagtatcgaaatcgccgcccttctcgtccaaaaactcagcttcattcatcttgatcccggcatcccgcattccgtgaagatgacaaagcttcaggcaggcggtgagagttccaatatcattccgggaaaagcatcgttcagccttgacctccgcgcacaaaccaatgccgccatggagaaattaaccgccgaaaccgaaagagcctgtgaggcggcggctgccgcattcggcgcaaaaatcgaactgcaaaaagaacacagcctcccggcagccgagcgaaacaaagaggcggaatccatcatggcatctgcgataagcggcattctcggagaagaacatgtggatgaacctcttgtgacaaccggaggagaggattttcacttttacgggttaaaggtgccaaacttgaaaacgacgatgctcggcctaggatgcggtctgcagccggggcttcaccatccccaaatgacatttgaccgaagcgccatctttacaggcgttgagatattaacggctgccgtcctcaaatcgtttgaagcataaaaaaagcagcccgttacagggctgcttttcttcgttatttcttcaaatcttcaattgaattgacgtttttcatatactgaggaacgaccagacccatcttgacgcctgtcagactcgttcctacatcttcatatttgcctttatatttagacgcatatgccttatgggtattcggaagccaagcagacaatgacgcatccgcgctgcctgtcgcaatcgcagtccacatcggtccggcctccacttgcgtcagcttcacgtcatagccgaggtcttgaaatacttttccgatcacgttcgtacttgcgatttcactgtcccaagccacatatgccaggttaattttatcccctttgactttatgggcgccttttgtccattgagccacttggtctttgtgttttttcacatattcagcagcggctttggccggcttttcgccttcttcaacggcaatcatgacttctcccatatcgtcctgcgtccatttgaactggctgagaactttggccgcgttaggctgttccttactgaagccggttcttgtaatcgtatgaatctgctcggcagttccgtacgtttttttcggatcatcaaggaacttcagcttgtatctggagaacatccagtgcggcgtccagcccgttacgatgatcggctttttccggtcatatgatttcttcaatgtcgccgtcatggcagcacttgacgccgtgacgacattccagtctttcaatccgtaatccttcacggcctcatccgtcagggccatgatccccgatcccggatcaataccgataatggttttgttcacctggtccgcagccgttgccttaccatcagtctgcgaaccgcaggcagccaaagaaagagccagcgcagcggtaacgccgacaccgatgattttcttaagcatcaggcattccccctgctcttcttcttcactttaatgttttgcgtgatacggtcgagtgtaatcgctacgatgacgatcgcgatacccgcttccactccgacaccggttttcaactgtgtcacggcgctgtatacttcagaaccgaggcccggcgcaccgaccatggccgcgataacgaccattgacaaagcaagcatgatgctttggttaataccggcaagaattgtttttgtggcaagcggaagctgcaccttgaacagacgctgagacgtcgttgaaccgaatgcttccgtcgcttcgatcaaatcagccggaacttgtttaataccgagaaccgtcatgcggatcgtcggaggcatcgcgaaaataacagatgccacgacgcctggcacaaccccgatattaaagaagaaaattgcaggcagcagatatacgaaagccggcatggtctgcattaaatccagaatcggtgtaacaatgcggcggaccgtttctttctgagacgcccatatgccgatcggaaccccgataataatggaaatcaaaacagatgtgacgacaagcgccaacgtttgcagcatcggcgaccaatagcccaaataatcaataacaaggaatccgattaacgtaaagagtgcaattcctctcgtactgatccaccaagcgagagctgcaaaaataacagtcaataaaatagacgggatgaaacccaaaccgctcacaatcgcgtttacgaaagcggccaaaccgtttgagattccgtcaaagaaacctccgaacgtcatggtaagccagtcaacaaaccggtcaacgatatctgctaacggaattctaggcaatctgtccatttacttcaccccctgaacagaagaatcctgagcttgttcagcagaatcttcaacatttatataatcgttatttcctgaaagcgcgccgattaatgcgccttttacgacaatgcctttcatgcggtctttatcgtccgtgacggcgatcggaatattcgcatcagacacgacatcgaaaatctccgtcaagtacgtgctttcgtttacagtcgtaaattcagtatttagaatatcctgaagcgataagtcggattccaccgcttttttcgcatccgccgcgtgaatgacgccgagaagctgtttctgtttatcaacggcgtaaatagaagaaataccgagattcttcatgagctgcagcgctacacgaggccctttgtcaatccgcacggtttcagcgcgcttcatgatgtggcccgctgtcagaactttggataaatcaacgtcctcaacgaatttctcaacgtattcattggacgggctcatcagaatttcttcaggcgtcccgatctgaacgatgttaccgtctttcatcagcacgattctgtcgccgatgcgcaatgcttcatcaagatcatgcgtgataaagatgatcgtcttgccgacagagtcatgaaggtctaaaagctcatcctgcatgtctttgcggatcagcggatcaagcgcactgaaagcttcatccatcagaagaatgtcaggatcattcgtcaatgcgcgcgcaagtccgacacgctgctgcattcctccgctgagctgatctgggaattggtgttcaaagccttcaagaccgacaagtttaagcgaatcaagcgctttttgctcacgctcttttttgtcgacgccttgaagctccaggccgtattccgtattttcaagaatcgttctgtgcggaaacagtgcaaatttttgaaagaccatgctgatttttttccggcgcacttcccggagctggtcttttgacatatttgttatcatgtcaccatcaatataaatattcccggcagtcggttcaataagccggtttaacagccgaactaaagttgatttaccgctccccgatagacccatgatgacaaatatctccccatcatatacatcaaagtttgcttgattgacaccaacggttgatccggtcgctttcaggatctcttttttgttttttccgctggacagcatctgaatggctttttttgtctgttttccgaaaaccttagatacattttcgacttttatcttaattggtttctcatccaaattcatattttccctccataataagcaatctttaataccgtaacacgtttgtaataagtcaaacaaacatcataatcccgtttattttgtatcattactttaaaaacatccctgtgtcttattttcctctggtatgcttctaaatactctctaatcctccttattgaggataaattataaaggaaatcgggcttttatcaggcttgagaacgtttccatcgaatgtgctgcaaactgatttcctatcctttttttacaaaaacaagaattttttcgcgacattgtcccggaaaaagaagttttctcctcctaaaaataaggaatattaaggagaaatataggtctgtcaacagacagctcactaaaaaaagcaccccaaaagggtgctcattgcgcaagctctgtctgtttcgtttcttttccgagaataataatggtgatgacggcaatcaggatggccgcacaaaagacggcgaaaatcactgtaaacgaaacgttccgggctgcaagcgatccgacgagaagcggaccgaaaatgccgccgattctgccgacggccgccgttgtgccggaaccggtcgcacggatcgccgcagggtactgctccggtgtataggcgtaaagcacgccccatgcgccgagattgaagaaggacagcagcatgcccgctgtgagcagcatggccaatgaatccgcggcaccgaagaaataagcgctgcccgccgttccgagcaaatagaagactaagatggtcttcctccccgctttttcgatcagccacgccgcagagaaatatccgggaagctgggcaagtgtcatcagaaggacgtattcgaagctctcaatcatgctgtagcctttcatcagcatcacgctcggcagccataaaaacatgccgtaataagaaaagacgacgcagaaccaaacgacagacagcagcaccgtcggccggatatacggtttcgtccagacacttcccgcctgcccgcgtatgctttttttctgcggcaatgcctgatgcgccggtgattccggaaggcttttccgcaagtacagcgcataaaatgcggccagcgccgttaagagcagcgcggcctgccagccgaatgacggtatgacaaagtaggaaatcaccgccgcaagaagccagcccgcggcccaaaagctctcaagcagcacgatgatccgtccccgcttttcgggaggggacgcttctgacacgagcgtcgaggcgacaggcagttccccgccaagccccattccgatcagaaaacgcaatatgagaaaaaccgtcaatcccgttgcgaaagcggatatgccgcttccgacagaaaagaataacagcgtgatcataaacacttttttccggccgatcctgtcggccagcattccgaatacaaaggcgcccgctgccataccgatggaattgacgcttccgatccatttcatttgatcgggtgttaaattccaatcagtgtgaagcgcggcgataataaacgataaaattccgacatccatcgcatcaaacagccagcccattccggcaatcgccagaagttttcgcggagtgacggcaggttgtttgttcataagcagcacctcaaatcgaaaatgattaccgtataagtttacacctgtctttacacattgtcattatcttttttcgcaaaaaaatcccgcttgccgtaagcaagcggggtgtgtgttaattctttaagactgcgtttttaatattatcctgaagctgttgaatccgtttcgcgccgtcttctctgatacgtctgttctcttcttcgatctgtttcgtttcctgcataccgctgacaatcgtattccaagacgtttcaatcgtctcaatgtcaatgctcggacggcctgccatacgggcaatctccacgctttggtttgaaatattttcagcgtttcgcttcagcatttcattcgtgcggcggtccagctcgctcattgaatcagccacaagcttttgccgtttgactgtgacagcctgaatgatgccgtttttgaaaatcggaatcgtaatgacgaaagcggaattgattttcccgatgagcttcgtatttccgcgctgaaggaggcggatctgcggcgccgtttgcagcgccaccatccgcgccatatctaaatcatagacacgttcctcaagcgcctgaagcccgtcacgcagcgtatcaagctgcatttgcgcaagctggtttccgcctgccgctttttcttcataagaaggaatgagcgcctgcatttcctcaagcttcatctgcccggcaacgacatatttttcaagctccatgtagtagttaatgttgttttcatacatctcttcaagcgtatggttcgtctttgccatttcatctttgtattttgaaatttcgacgtggattttttcaatttctccgcccagggtgcggtacttttgaaaaatcttttcaatcatactgttgccgcgtttgaacattttagcgagaaatccttttggttcatcgaaatcatttttgtcaaaacggtccatgatttttccgagctgcgtcagcattgtgcctgaatccgtgacacttgttgttttcatcatatttaagatgcggtcggagaacttcgagatttcaactgccggttcttttccgtactcaagcagctccatttggtttttcacgtcaatctgctgcgaaatgcgctgcacctcagggtcttggcgcagctgcaccctgatgtcatctgctttttgttcagaaatctcttcatttttatcaagaacaagcggattttgattttctgtcatgactatttactctccctgcttttgcgtaatggttctaaacagctttcttacgagtgacggctccttatattcctgccgaaacaccatgtcctccagccaatggacatcaaattggctttcttcaatataatgctcaatgtcctgatggcccggcggattatacaagatgatatcgacgccgaatttatttaaaaacaacagagcggcggcgtcagaacgtgtaagttcgccattttgttccgtatgatataaaacgagtttcggaacggtttgggcgtaatcaaacgtctgaatcaattgcagcagcgaagcgggcaggttcgtcgcctggcggaacaaatagattgcggcatcccttgcctgctccccgggcaaagccttcagccctgggtttctgcacatgtcagaaatcacattggcgatggcgttctgcacgcctgacgggagatgcttgtactgccagatgttgcttcttttcagcctgtccgcgtcaatcgctccttcttcgttcaaaacctgactgtagtgatactggtagttggctttcagctcttccgtaaacggaaaactgcggatcatgtgtgtctcctgatagtctgcggcggtatggagtctgttccaatattctttcgtatctttggaaacccccatcactttcgcaaaaaggttcggaacggccacccgctccctgtccgctttaaattgcggccggataaacgcccgctccttcgcaatgagaaataactcatcatacgtcgtttttaatgtcacggactgcggggtatgatccctgaactgccaaggcttatacatcatagattcctcatggttcagcacatgctcaatttctttcgttgaccggtaggccgtcgtggacgttctgtccggcttttctttcgggaatggctcaaggccgcctgttgcggggagctttatcacaaagctgagttcctcatccggatcaatcaagctgaacggatcttccgcagccggatgaaacaataggacgtcacagccgatcagcatgagataatagagaaaatagagctggcttttggcagcgtctccataccacaccaccttcggcatctcacgctctatatcggcttgttcaagccatggattcaggtggttcagcgaaaactttgacacatccaagagcacacgccggaaatcgggatgattcagcccgttttcatgccggtccgcaaaggtttccaaaagcgtcataaacgcggttctcagccggcggtgcataagcggatcagcgtgtttggcaagcagcctgcccccatcgagaaacgcgacaaacctggaaaccgaaagccctttctctttttgattgaccgaatggatgtgctgcagcgcctgaaacgtttcaggcgcgatggtcttatccagcgtctcgcttaacacatggatgttttcgtgagaagacagctcgaaaagcttattgtaatactccgtctcatcataaggagtgcccaaaatccggacggcaagacgggtaaacgccagcccgttttcccgctcgtaaccgggacgttccggcagcggccgcatcagaaacgtttcccagtcatcgttttccggctcggcctttcggatcaccaattcttcctgcctcatcattttcctcctttctcttcatgatgatcggtacaaaaaaggaaggaaatgaactctccctccttttttgttttattcttctttagatgcagccgtttgctcctgaacctgcttttgtttgttgaaatagtggataataaacgttaccacaaacgcagcgatgatgattccgaagaacaccacgtgcggcatttcataatcaaaggcgctcgccgccattttcacggcgataatcccgatcagcacaaaagccgtattttcaagctcagggattttatcaattaaaacaaggaatacttttgcgactgtacgcatcatgagaatgccaagcataccgccgatcaagagcacccacactttttccgataccgcaaacgcggccagaatgctgtcaacagagaaggccaaatccattaactcaactgaaacgacagtggcccagaaaattccgaacgtacggaccatccatgaatttttcttcatgccttccgtatcgtcatcaccttctccgatccagaaatgcttaatgacgagccaagccaggtacagcgcgccaagcactttaatccaccagaacttaatgagcagcattccgatcccgataaagataaaacggaaaatatatgccccgaacaatccgtatgttaatgctttcttccgctgtttttcaggcagatgccttaccatcaccgcaagcactaacgcattgtcggccgacagcagcccttccagcagaaccaaggaaccgatcagcccccatgatacagggtcagtcagcacctcaccccacattttccaatcaaaaaaggaagcgtaggtcgacataatatgatgtagaaaatccaagttttttcctcctatttagtaaaacggtaatttcctgcttacacctgcaagccgtaattccggcaaagtgatgccagaccgccggaaaacccgctgccgatggcgttaaacttccactcagccccatggcggtaaagctcacaaacgacaaccgccgtttcaatcgagaagtcttcccctaaatcgaaacgaagcagttcattctggctgttttcatcgacgacgcgcacgaacgcgttcgaaacttgtccgaaattttggccgcgcgcttccgcatcatgaatcgtgacggtgatgccgatcttttcaatatttgcgggtatttttgagaagtcgacgataatttgttcatcgtctccctcgccctcgcccgtccggttgtctcccgtatggatgacgcccccgctcgggtgttccaggttattgtagaaaacaaaatcaagatcatttacacagttgtcatgggcatcgacaagaaaagccgacgcgtcaaggtcaaagtcatgccctccggagtacttgttcgtatcccaccctaagccgatcaccgcttttgtaaggccggggttcgtttttgtcagatcaacacgctgtcctttcgccaattgaatagccatgtgccgtctctcccttctgtgtttgatatggttcagccgatttgcaggccgtaatctgtcgcaatacgggccagtccgccttggtagcctgagccgatcgcggaaaatttccattcgccgttatgtctgtaaagctcccctgcgataatggctgtttcaattgagaaatcttcagccagatcatagcggatcagctcctcatttgtctcttcattgacaatgcgcacgaacgcgttggaaacttgtccgaagttttggccgcgcgcttccgcttcatgaatcgtgatgacgaatgaaattttgtcaatagccgcgggcaccgcgctcaggttgactcttacgctttcgtcatcgccttcgccctggcctgtcaggttgtcgcctgaatgtgcgacagagccgtttccgccttcaagctgattatagaaaatgaaatcatcaggcgacgcgcattttcccgcttcatttaatagaaagacgctggaatctaaatcaaaatcatgtccgccgtcgtatttgtttgtatcccagccaaggccgacaacgactttagaaagacccggatttgttttagtcaaatctactttttgtccttttgccaatgaaattgccatgtgtgcactctcctttttatcgtttaggcgtatcggttaacgatatcgccgatttttgtatcgtttgtgccttctcctactgcggcgaatttccactcgccgtcctggcggtagatttcagccgcgatcaggctcgttctgcctgaatagttatctcttaaattgtaagtcaccagttcttcgcgattagcctgatcaacgacgcggatgaacgcgttttgaatcatgccgaagtcctgttttcgtctgacgcagtcgtaaatattgacgacaaacacaagtttattaatctgagcgggcaccttcgccaaatcgatgagaatttgttcatcatcgccgtcgccttcacccgtcaggttgtcacccgtatgtacgacaccgccgcaccggcttttcagattgccgaaatagatgacgtttttgctgtctgtcattttatcattttcaagcatcagtacggaagcgtcacagtcgatattggcaccgcctccgccgaacagctttccgaaaaagcccccggatgatacagggtcccagccgagtccgaccagcagttttgacaggccggcttttccttttgttaaatcaatccgctgtcctttttgtaaagagatcgccatatgattcactcctattctgtaagggtgccgctaagcacgccgcaagtgcgcatttttactaaattccgggacaagaatcccggtgtttattaagatatacgtcttttattatatcaaagtttcataaaacataagaatttttggcgaaaaacggcgaaaaattacttcctatattctccttcgttccggagagaatagagaaaacaaagaaattgacgaagactgaacatttttcctatccttgtatcaatacatgtcagtaaaggagcagacgagtgattgatttaagcatacttgatcaggcgcccgtatccaaaggaaacgggccgcacgagacgctccgccgttcagcggagctcgcccgtctcagtgaaggatggggctataagcggtactggtttgccgagcatcacggcacaagagggctcgcaagcgtttcgccggaaattatgatcgctcataccgccgcagccacaacgtccatccgtgtcggatcaggcggcgtgctgctgccgcagtacagcccctataaagtcgcggaaactttccgtcagcttgaggcgctgcacccgaaccggattgaccttggggtcggacgctcaccgggcggcacgacgaaaatccggctcgccctcacagacggggtaaagaaaagcatgaccgagtttaacaggcagcttcaggatttatcatcctttctgacagattcggttccctcggaccatgcttatgcaggaataaaaacagcgcctttgattgaaacagccccgcagctttgggtgctcggcctcggggaaaacagcgccagacgcgccgctcttcaaggtgcgggctatgtcttcggccatttcattaatccggaacgcggggaaaaagcttttcagatctatcgggaccatttccgggcctccgcccatttttccgctcccgcctcgctctgtgccattttcgtcatatgcgcggctacggatgagaaagcggaagaactcgccttaagccaggatttatggcttcttcgtgtcggaaaaggcgccgacagccgcgtgccgagtgtggaggaagcgaaagcttatccgtattcgccggaggaccgtaaacagatagaagaaaacaggaagcggatggtgatcggctctcctgccgcagtgaaacgccgtctgcttgaactttccgagcggtatcagacaaaagagatgatggtgctgtgcaacgtctttgatttcgaagcaaaaaaagagtcatatgagcgtcttgctgatatatttctgtgaaaaaaagccgtcaaacggagcagcagatgagactgctgcaccgcttaacggcggttttttcgttcttttccttttttaaacgcattccaaatcccctgcagcgtaaacccgagcagaagcagaatgattaacagtaaagtgattgacggccccggaggcgttccgagctggtacgaagacgtcagccccatgaacacactgaaaagagaaataataatggctgccgcaaacacccatttaaaccctttggcgatacggattgcaaaagccgcgggcagtacgaggagcgcggaaacgagcagcacgccgataatcggaataatgaccgaaatcgccagccccgtcacgatgctgaatgacattgacagcaggtttgtgttaatgcctgatgtcttcgccgtcgcctcgtcaaaagtaagcagatagagcggtctgtttaatataatgaaataaagcagaatcagcagggtaatgcctccgataatatagacctgctgctggctgaccgtgacaagcgatccaaataaatattgatcgatgctcatcgacgcgccgccttttgacagactgatcagaaacatcgcaaacgacagcccggccgccattaagattgcgatagatacctcggaatatgtacggtacgcccgccgcatgtattcaatgccgatcgctccgatcgtgacgacaacgatgctcgccgccgtaatattggtactgagaaaaaaaccgatggccacgcccgacaatgaaatatgagacagcgtatccgccatcagcgcctgtcttctcagcacgagatatacgcctaatatcggcgccataattccgatcatgcttcccgctagaaaagctcgtcgcatgaattccaagtcaaacatttccatccgcctttttcccccctttcaagccgtatgactttatccagatactgctgtacttcgttttgttcgtgtgtcaccatgacgacggtgcggttgtgatttttcacctgatggtgcataaattcgtagaaaccctgtctgctttcataatcaaccgcggttgtcggctcatcaagcatcagcagatccggattgctcgcaagcattctcgcaatgcagattttctgcttctgtccgccggataaatcgccgattttccggtggcggaaatcccacatttccaccatcttcagcgcgttttccacctcgtggtgatccgtttcgttcaatcgtttaaaccattttcctttcgtataacggcctgattgcacaagctccagaaccgtgcttgggaatcctgcgttaaatgaagaaatctgctgcggaacatagccgattgtcaggcgttttccagctgcgttttttttactgatctcggccgttccttcccaaggtctgagcatgccgagcatgactttcatcagcgtcgattttgacgcgccgttcggccctgtaatgccgacgaattcgccgcttttaatttccagcgacacgccgtcaagcaccggtgtatgcgaataaccaaaaacgatatcctgtaatgtaacgagattcatgctgaccttcctttcccgcatagaaatagtgtgcaccccgcggcgcacactatgttatttaaccaatagcgaatctttcagtgcatcaaggtttttctccataatgtcgatataaccgatgcctttatcccgttctttttggcttaaaccttccagtgtattgagcacttccgttttcgcgccgatttcaccggcaagtgtatctgcaactttaggcgatgcaacttcttcaaagtagatgatcttcacatcatgctgtttggcaaacgttttgagatccgccagtttggccgcactcggctcttcttcaggagaaaggcctgcaatcgcgacttgttttaagccgtattctttggcgagatagctgaatgccgcgtgctgtgtgatcagttcttttttcgccgctttatttaatgttgtacggtatagtttatcaagatcctgcagttttgcaatatattctgtactatttttctcatagtatgctttattcttcgggtcctgttttacgatctgcgccgtaatggttttgacctctttttgcgcaagaaccgggctgagccacacgtgagggtccatgctgtggctgtggtcatgaccgccgtgtccatgttcctcttcctcttcatccgaaccttcgagtaagtcaattccttttgacgcctttacaaacttcgcatgatcagagctcatgcttttttccgctgaaggaacccatgtctccatatattcgctgttgtatacgaaaagatcggcgttttgaatgccggcgatatccttcggcgtcggctcccaatcatggggttcgaccgaagacgggatgagaatgtctacatcgcctttgtctttgacaatttgtttcgtgaattcgtacataggataaaaggtcgtcacgacgtgcagtttgccgcttttcgaagaacctgacgaaccttttgaagatgaattgccgcagcccgccgcgattaaaaagcatgccgcaatgacaatgattccgctccattttttaaacaagccgtttccccctgttctgtaaatcagaatgatgacgatttccaaagcgttctttctcgttcatttgttacctataccataataaaacgaagtaattacgttttgcaagatatttttttctaaattaatatccaatttacctaaaaaaccccgccatgtatggacgggggagtcctatcacatatcaggcaagcagataaactcttgtttcgtatgggcggaatgtgatgcgggattccgtgccgccgtcattatcatagttgctgagaagcagctcggccctttcaggttcggaaccgtccggccaataaaaagcggcttcttctttcgatacgttgctgatggacatgagtttttgtccgtttgcctgtctttcatacacgaacagctgcgggtcatcaggaagcagcagcttgtagctgccttttatgatatcagcatactgttttcgcaggcggatcagttttttgtaaaagttcaatatagaatcgggatcatcctgagcctcggccgcattgacggttttgtaattgggattgaccgcgagccacggttcgccctccgtaaatccggcattcttgctgccgtcccactgcatcggtgtacgggcatgatcccggcttttcgccataatggacgccatgacttctcccctgttgcggcccatttcaaatacccttttatgatacatattgacggtctgaatatcttgataatcctctattctgtcaaacggagcgtttgtcatgccgatttcttccccctggtaaatgtacggcgtgcctttcatgaaataaagcagggcggcaagcattttggcggatgctttgcggtatgtgccttcgtctccgaaacgggatacgatccgaggctggtcatgattgcaccaatacagcgtgttccagcctcgatgttccagtttttcctgccagtctgtgagcaccttcttcaaatcggacagctcaagcggttttacatcccaatgctcttggcccggcttttgatcaagctccatatgctgaaaatgaaaaatcatattcagttcatgctcatcggttcccgtgtagaccagcccctcctcaggcgtcactgatccggcctcgccgaccgacatcacgtcatatttggaaaacacctctttcgtcatttcttttaagtaatcgtgtatccgtgccccgtttggccggaaaggcttcggatcggcccggcgggcgatgtaatcttcatatggcggcaaatattctttttttgacagaagatggagctggtctatacgcaatccgtccacgcctttatcgagccaaaatctcatcatctcgtacacggattgccgaacctcgggattttcccaattcaggtcggcttgtttgacggcgttcatatgcaggtaatattcgcccgtatgttcttcgtactgccagacggattgtccgtaatccgacacccaatcggtcggcgggccgtccgcggtgcccggccgccaaatataataatcgcggtatttgctgtccggattcatttccgcctctttgaaccaaggatgctccgtggaggtatgatttaagacgaaatccatcacaagctttaatccgcggctgtgggattctgtaagcagatcgtgaaagtcctccatccttccgtaagattccataatcgcttgatgatccgtcacatcgtagccgttatcgacgtttggcgacgggtaaatcgggcagatccatatcacatcagcgccaagttcttttatataatcgagacgcgcgataatcccccgcaggtcgccaatgccgtcgccgttcgtatcttgaaagcttcgcggatagatttgatagacaacggcgtctttccaccagtcattctccatcttgcggcccctcctgttttttagagaaccatttcctttataatccttccctaaacaaaaaagagaaggtttcccctcctcttttaactttccagctgagacggataaagcgtcatgcctccgtcgacgaaaagtgtcgttccggttacgtaactcgcttcttccgacaccatccatgcggcggccgcggcgacttcttccggttttccgaaggcgttcatcggaatttttttcagctgggcctgtttatgtgtttcatcttccagatccttattggactccgtggcgatcgtgccgggagcgatggcattcacccggatgcctttttctgcgtaattgagcgccatcgtttccgtcatcattttgatcccgcctttggatgccgagtactgcacgttttcaggacgcggtatttgctgatgaacgctcgatatgtttaagaccgttccttttttgccgcgctcgagcatatgtttcagtgccgctttcgcccccaaaaaggtgccggtcacgttgacgtcgatgaccctttgccaatcctccaggctcatttcatggggcatcgcttcggccccgttaaagccggaattgttgaccatcacgtccacacccccgaaatgctcctgggcggcatcaaacagcgcctgaatcccttcttctgaggatacatcggcttttacggtgacggctctgcctcccgctttctcaatgatgtccgccgcttcttccgctccggcggaatcaccgaggtagttcacaaccacattcatccgctccttgccgaagcgttcggcaatggcttttccgattcctttcgaagaacctgttacgatcgctgtttttccctgtaaatcctgatacattgtctcatttcctccctgatgttaatacagagcatgtacccggttttaatcggctgaaaacaaaaggaatcataaaaagaacgatgaagccgaagctccctcgttctttttttcattatgcgtagttgttcatttgcagccttttttgcacgccgacaagcctgctgaaaaaataagatgccgctttgtagttctcccgttgatgaaagaaatgagccgcgtcctgaagcagttcctctgtgtcagccaacagctcttttgattccagaatgtcaaaatactctttgagcgaatcctgtccgccttccccctgataaagctctttaatcagacggaatttcgtcatatagatctcatcttcccactccgccgcgcttctcatgccccgcgcgcagctggcggcggcttcactgtatttttccgttttaaagtagatatgcgtgagtgaaaaaacagcctggatgacctgccggaagctgtgtgcttcaaatccggcagccgcccgttcaaaatcctccgccgccttgcaaaaatcacccagactgtacatacagtgcccgatattataataggccgcagcaatcatatattgatcatcaagccgctccgcgtgctccaaggcgcattcgaggtattccagcgcttttttatgctgctgggcgtccatcagatttccggcaatgataaatttgcactgcacccttctcattccgtataattcatatttcttgtaaatatcaagcgcctgccccgcgtaattcatcgaaaagaaagtctgcttgatatgatagtacacctcagaaattttatacagaaactcggctttctctatgtcatcttccacatattcaagcttttcctcagcccgcttataatgagaaatcgctgagatgaagtttttctgcttaaattcatacattcccctgaaatagtaaaaataatattccagtaagccggtcagcttttgctggttcatctcaatctcagtgagcatttcagagaacggaggctggcagtcgccgtctttcatgggttttaatttatccagcatgatgcggtgccgaaattccatcaatgaaaaatacaacaataaatcctggttctcttccatatcttcgagttcatattgaatctcccgcttcagcgcttcagcttgatcggcttcaaacgcgcggatcagcttataccattcattcatctttacggccacttcttcagatggaatcttggatttcatagatttgcctccttcctccggctactaattatgttatattttatcatagcaaatttatggcagtgagcaaacaaagatttaaatcaattaaagaaagagagaattcaccatgaaacgaccagtcagaattgcgctgcttttgatcctcttcttttccgcagacctatgtttttcctatgtgcagaaagaattgaggccgcagacggcattacaagacagagccattccaagcgctcttcatccgctcgtgaaacagaatgcggagctattgcagacggccgctctgaaaaaaggcatcaccgtcattatcacagagggtttcagatcaattgaggaacaaaacgaattgtaccgtcaaggacgttcaaaaaaaggaaatatcgtcacctacgcaaaaggcggggaatcttaccacaattacggccttgcgatcgacttcgccctgcaaaaaaaggatggaagcctgatttgggatatgacgtacgacggaaaccgaaacggcacgcccgattggcttgaggtcgtatcgattgccaaaacgctcggttttgattggggaggcgattggagaggctttaaagattatcctcatttacaaatgatccctggctaataaaaccttttcttttttcgcttttgcgcatcaatgtacggaggatagacaggcctgtacacaagcttatatccttcattgccggacggcgtaaaatcgcgctgccactccagccgcagatggaaatcggataaaaaagcggcctttgcttcttcgggagtaacggccggcaccggattgatcttctccagctgctccgggtcaatgtcaggcgccatgtaagcttccacaagccccgttacgggactgacaagtattctcgcagcgccgaaccgcagcggaatatcctgatgccatacggaaaaatggaagcggaacctgccccttccgtccgttttcagcgggttcattttaaaaaactcgtccgctctcggataaagcttgtataaaaattgaagcgcgacggtctcacactcttccgcagaataaaaggccgggccctgatgctcaataaaagatttaaaggctgtcattttccctgtctttttgtccgttttcatcttcattgtatttttgttgctgctttcaaaatagctttcgatactcaaatctttccgttccggaaccgatcctttccgccatgtcgttccgatctcatccccgagatcgcgccggcgcgtctgaaccatatccgaggtaaaccccattaattcatccaggctgatttcccgtttatgttcaaacgcgggaagcggttttgccggctcattcctgtcttcgcaaagctgctgatccggcacgatatcatcttcaccggccggatagctgtaagccggcagaatcggttcatagacgagacgcggtattttctcaaaattgaccacatcatagacgagactgaatgtcagcacactcatataatgcgagacgactttttcccgatcgacgaatgtttccgggacgggcgcttcacccttatccccgtaatagataaactgcacgacgaagccgctcctggttacatcaacgaaaaaacctgaatcgggaagcggccggccgagcactttttttgtatagataaatcggatgcacccattgcgttcttccctcgcctgaaagatgaaattcataaaagtaagcgggcggtgtctcgccgcaaaccgaagagccgtcagctttaattcggcgtctgacagcttcatgtctgaactcggacagtcgttgcgtgaataggtaagcaaagatccatcgtcgcccagctcaatcgtgaccgttttatccggatggttacgatctttccatatataataggctttcgttttttgtttttcatcataatcttctatttcaagctcatagtccagcggtatgttcccgatttccagcgctttttttctcagatgttctttcagcaatggggtcatcctttcagaagagtgtataaaaaagaactgttttttattatataaaaacgtccttatccttttaaagggaagaaagtgccttttatgtgtctatttttagcaaagagggaaaagagccgtattcagagcggctctttttcatacaaatgtcacattccccgtgaaagccccgggacgaacgcccatgaccttcagcctattaaactcgtgatcgcttcccctgtatgagcctcaataaaccgcgggaaaaccggcttgtatacgagcctgtacacttttccgcagctgtcgtcatcgtaacaacgatcccaagcgagctcggctttgatggcccggcggatcgcgtccttcgcctcttccattgtcaatgaaggaacgggatcgatttcctggagctctttcggatcaatttccggcggcatataaaaagtgacaagacccgtctttttgctgacacagattctcccctctccgaatcgcaaatcaacgccgtccgaacaagccttatatgtaagccctgcgttttctccttcatcatccggttcatcatattgaacccggaaatactgatccgcttccggaaacatggcgaataaaaagcggatggccatgtgatggcattcttcctcggaaaacaccgattcgccttcaacttttataaatgacatcaccccggtgagccggcccgattctttatcatatcttgttttcaatacgtgttcattccgttctttaaacagactttccaagcttttatcttcccgcacggattttgttttttcaggacgccaggcaatgccgatacagccctctccaagatcgctttccctatctttataaaaaccgtcgtgcagcccgatcatgtcattgatgctcatcttttccgcttcaggtgcagggcgtgaaatcgggacatacggccgcgtttcgtcttccagctcttcatattcgtctaattctgcattctcttccttcaggtcggccgatatcggccgcgtcggagacacgatttcatagacgagatggggcttgtcatccccctgcacatagacggactgatgcaggacggtgaacaacagctctgcttcaatatgtttgacaaagtgagccaatgcttcccgcttgtccgcaattgtctccggtcttaacagatcatcggccttcccatggtaagaaaagccggttacttcccctgtcacagccaggtcgatgtaaaacccggtcagcggaagcggcagaccgtcagccatctgaacataggaatatctcacatcgccatcatttgcgggtccgtttttttccggttcaaactcagccaatgcccccggacgatgggtttctaaaaacgcccgcatccgttcttctatgtccgattccgaaagagccggcagatcagtctggaaagccggacgggataagtatttcagttttccgtcccggtctaattcgaccatgatgccggcttccggatcattcttatcttcccaccaaaacagaacctcatcttcctggtattcttccacattactctcgtagcgggcaggtacgtttccgattcggagagccagctgtttcaattcttctttattcatcataacacttccttttcttccaaaaagattgatgattaccaagactcttttatacaaaactagtataattaacctgtccgtcttcatgactatcgaattaatcattaacaacagggggtaaaccagatgtccatcaaaaaaatgagcgccgtgtttttcattctgcttctcacggcatttaccgccgcgtgcagcagcgaaacgagcggcggccaggaaagcagcacggcgaaagtgaaaataaaagagacggcatgggccgcttcagacgatactgaacatccggccgcgctgaaagtaacggtcaccgtcaaaaatacgggcaaagacccgcttaccgtcaaaagcagcgacttctcgctttatcaggatgacgcgaaaacagccaaggccgataaggaagacttgatgcagagcggcacgcttcatgccggtaagacagtgacgggcaatctgtacttcacagctgacgaaggcaaatcctatgaattggtatatcagccgcaggcaaaagacgcgaagcctttatcttataaactgaaagtcaaaggcacagcctccaacgcaaaacctgacccggcggacgcattatccgcatacattgatgtgatgctgtacggcaagcacaataaagatttcacccgcctgaccggtgtaaatgaaaaaatgacggccgccgcatatcaggaatcggcgaaagccagctttatcgcttctgcaggcatttcacaagaacaggcggattcaaaagccatttccgctattattgacgccatgtcatcagcgcttcgggataacacagagctcaaggtgcataccaaatccatgtcaggcaaaaaagccgtccttgaagcaaaagtgacgccgcttgatatgtctccgcttgcgggccagctgcaagaccgcgtgcaagactatgccggaaagcaccctgatgctgatgaaaacgaaattgtcagccacctgctttctgtctatccggaagagtttatgcgcctgaaaccggcttcttcttccgttacaagggaaattgagatgaagaaaaacgcccgcggccagtggtatctggatacagacgccgatctggaaggattgacagaagcgtttttgaaaacgtcctgacaacaagaaaggaaatagcgcaggctatttcctttttttattttcacttaaagatgtcactgatatattgaacctcatcctcggttaactgcacatgaagcgcgtccagattgtgtttcagctggtcggggcgtttggctccgggaatgatcgcatccactgccggctgcgacagaagccacgcgagtgcgatatgcgctgtctgcgcccctttttcctccgcaacggcccgaagcttatccactctctccaggttttggcgaaaagcttccccctgaaacggcggcctgttctttcggctgtcctcaaagactgtgtcttttgtaaactttcccgtcagcaagccggaagcaagcgggaaataaggaataaaggaaatgccgttcttttcacaataaggcagcagatcatgctccgcctcacgctgaatcagtgaatattccgattgaaaaacctctaaatagccgtccgcgttaaactcctgcaattgccggaagctgagattggacgcgccgattgctctgattttcccttcgtccttcagttcttttagcgtgcccgccacttcggagagcggtgttttgccgtcagggaagtggacgtaatacaaatcaatcacgtctgttttcagccgcttcaggctgttttccgcctcactccggagaaattcacggctgttgtccagctcgatttgtccgttgacttctttatgcgcgccttttgacgcaatcacgaggctgtcccgcacgccgcgctctgcgacaacttcaccgattaactcttcggaacgccccaaaccgtatataaacgccgtatcaataaaattgacgccgccgtccaacgctgtgcggatgagttcttttcccgtttcatcattaagattcggaaacaaattatgtcctccgaccgcatttgcgccaaaaccgatacgctttacccgtaaatccgtcctgcccagcgtacgtgtctcatccatggctcaggctcccttccttttatcgctctgtttagtattagatagacggtaagaattatcctgcctgagagcctatctacagaaaaaaccttgaaaagcgtttgcccttcaaggtttttttgctgtgtattaagatgtcagagctgcggcgaagcgttcggcttcatccgtgagagcaccctcaatttccttatagcggctggaaatcgttgaggcgctgacgccgtacttcttcgccagcttcgcttgagaaacggacgcgccgttcagagaaatgctgtttacgtaatattcgaccgccgccgcgaaagcttcaggctttctgatcgtcggtgtttttttgacacagaacgttttccacagatcaattacggccggaaccagctcagccgggtattcatccccgctcaggcctttttcaatggcgtctgccgtttccttctccatgtcgttggcccactctgtctgtttttcttcagcagcctgctcaggctcttccgccgttcctaaaagagcggccagcacaatgtcgaagttgtcctgcataaagcgctcaggcgattttccttccgcaagagccggggcagccgcctttttcactttgctgattagagcttcggtccgcttcacagggaagatcgtaaattgcatgaagaactccgctttttccgcttcgtggatcggatagccgagaatcaggcttcccgccggcggaagatcctgctggctgacgtccatttccactttgaattgttttttcgtcatcacatcttcaaagtgaatcattccttctttcacatcttcaagcaccataacggcaggtgtcatgcttttccatgattcaacgatttcccgtgttttcgggcggttgatgccgccggcttttttctgaagatattcttcaaaaatcgtcttgccgcctgccagcggacggaagaaaattccccaaatgccgaggttgaagactccgatgtcttttgtctgtctgtccagctccgtaatgaacgcgtgctggttaataaatgatgatatgccgtctctatgtgctgtaaaggcgtactccattaggctttcctgaatctgtttcgcttcttttgccgcgatgtctgccggaatggcagcttctttgcttccgcagcattttttatatttcttcccgctgccgcatgggcaaggggcgtttcttttcacttttcccacaataaaccctccgaattctgatataactttattattttaacaaaaataacttcagagggcttggtttacggcgaaaaaagaatatggaagaaaaaaagaccccgggatattctcattctccggggctttgaaactgttaatttgtattttgtccgccgccgttcagaccttctttaatcagcccgtttacttggctgttcatcaaaagtccgatgtgtccgacaccgtgaatctgcacgtttttcccgccgatcagccgtgacagcgggttcaggacgattaagtccgctgagctgtaaatcgatgtatataaaatcttttggttcggatcagtccccggaagcgcccggttggtcacaaggccgttcgctccgcccagtgtgacgacgtttgcgattttgtctccgccgtcaagatttttaatgtaatagagcgtgttggcgccgcccatgctgtgcgcgacgatatcgacttttttcgcacctgtttcgctgagcacttttttcacgtaattggacagtctcggtgcattgtgtctgttgtttccggttttgtccagaaaatcaatggcgtacatctcatttcttgaccagccttgggatgccaagtacgttttgattcccgcgaagttaaaggacgccccgccgattccgtggaccatgacaaccgggttatgctctgaggaagctttcgatacggtcggctggaaggcaaatacggaaatgacggagagcatgcagactgtaagaatcgctaggattttgcttttgatttgtttcatgaactttcctcctgttatgtaattttttgcaattttcattttattagagaagaaaaggaaaaaatagagtattttttactgttttcaacaattgaaaaagaggcggaaaaatgagaaagacgcccctttcccgaaagcacacttatactttaatacggcaaacaaaaaaaggagagaacacccggttctcttctcctagtactcattgaaataggtttgaatccgcttagggtcatgcgtttttgtcagcgcgagcatcagcagaatccgcgctttttgagggttgagagagtttgaagctgtcaaatggtctttttcatactctcgattaggtgttaccgttccgtttcccgtccttgtggagcggacgaccgccagcccgcttttgaccgactttacggcgcctttatgcgccgcatcagacattgagccgtttcccgggcctgcaaaaataatgccttgcgcccctgattttacagcagcttcaaagagatagcttccgtcattttgatagccgtatataatatcgacttgcggcagtttatcaagtttgtctatcttgaaatctgtatccttcgtatgctttcgggtcatgatgttattaaaatagatgtcatcagcaattgttccgatataacccatctcttccgatttgaatgtgtctgccgcggttgtattggtttttgtcacatagcgcgccgaagcgattctgtcatttaatacgacaagcgtccccttacctttcgcatcaggcgcagccgctgtttttacagcgttatataagttggacggcccgtttgctccgatcgccgtggacggcctcattgacccggcgacaacaacgggcttgtcacttttgaccgtcagattgagaaagtaggcggtttcctcaagtgtgtctgttccatgtgtaatgacaatgccgtctgtatcatcagacttgagcagcttgtttacccgttttgcaagtttcagcagtgtctcgttattcatattctggctgcctatattcacaacctgttctccgctcacatgcgcgacctcttttatctccggaacggcctgaatcagggcatcaactccgattgcccccgccgtgtactccgtagcggacgtctttgaaggagcagcgcctgcaattgtgccgccggtggcaagaattttaacattcggaagtccgtcttttttcgctggggctgcggctgccatccggggcggtgtttctttcgcttgaggagattgggagcagccggccgcgatgaagagcagagccgtgataaatgtaatgaagggcataaattgttttttcattcttttctctccttttctttatttatgaagattttcctctcaccggtcaacgcgcttgtcaggcaacctcccgaagaaaataaccgttaaaaaaccttgacaccgtcatgtgaaatcaagataatagaccagtcactatattttaaatttgtcaaaaatcagtaaggtgggaacattatgagctatggagattctcgtgaaaaaatcctcgccgcggcaaccaggctgtttcagcttcagggatattacggcacggggctgaatcagattattaaagaaagcggtgcgccgaaaggttctctttactatcattttccggacggcaaagagcagctcgccattgaggctgtcaatgaaatgagccattatatccgtatgaaaataaaagaaagccttgatgcccatcctgatcctgcggaaagcattcaagcgtttttacaggacttatcaagccaattcacatgtccggaaaactttgaagggtttcctgtcggtttactggctgccgagactgctttaaagagcgaaaagctccagcaggcctgtcaaagcgcttatcaggaatgggagaatctgttcgcgggcaaattgagatcagccggtttttctgatgagaaagcggcggaaatcagcactgttttaaatgccatgatagaaggcggcatcattgtgtccttagccaaaaaagacaaaatgccgatcctccatatttctaaacaaatcccgaacctgctgaagacataaaatacgagagacatgtacgtatagaaagagaggagaatgattttggaaaatgctcagccttccaaacaatataaagtcatgccgatcatgatttctttgctgacggcagggtttatcggcatgttcagtgaaacggcgctgaatatcgccctgactgacctgatgaaggagttacatatcactcctgcgaccgtccagtggctgacgacgggctatctgctcgttctcggtattcttgtcccggtatcgggtctgcttttgcaatggtttacgacgagacagctgtttatcgtttcacttgctttttccattatcggcacgctgattgcagcgcttgcgccgagctttccgtttcttttggcggcaagaatcgtgcaggctttaggaaccgggctgctgctgccgctgatgtttaatacaatcctcgtcatctttccgccgcataggcgcggagcggcgatggggacgatcgggcttgtcatcatgttcgctcctgcgatcggtccgacattttcagggcttgtgttagagcatttgaactggcattggattttctggatttccctgccgtttcttgtgttggctcttttattcggcatcgcctacatgcagaacgtgtctgacattacaaaaccgaaaattgacgtgctttccattattctgtctacgatcggatttggcggcatcgtattcggattcagcaatgcgggcgaaggatcagacggctggtcaagcccgacggttatcggttcgctcactgtcggtgcgatcgcgctcatcttattttccatcaggcagctgacaatgaagcagccgatgatgaatctgcgcgctttccgctatccgatgtttgttctcggtgtcgtgattgtatttatctgtatgatggttatcttatcaacaatgctcctattgcctatgtatttacaaagcggactgatgctgacggcgtttacgtccgggctcatcctgctgccgggcggtattttaaacggctttatgtctccggtgacggggcgcctgtttgataaatacggaccgaagtggcttgtcattcccgggtttgtcatcacggccgccgtactttggtttttctcaaacattaccggcacttcaacggccattctcatcgtcgtgctccacacatgcctgatgatcggcatttccatgatcatgatgccggcgcaaacgaacggcttaaaccagctgccgccggaattttacccggacggaacggccattatgaatacgctccagcagatggccggcgcaatcggcactgcggtggcggtcagcatcatggcagccgggcagaagaattatatgagcaccgtgaaaaacccgaatgatccttccgcatactctcacgcgctgattgcgggcgtccagcacgcctttatcttcgcgatgattgtcgctgttatcggcttgatcagcgccttctttatgaaacgggtcaaagtgaatcactcataagaaaacagcaggctccccgggagtctgctgtttttttatataccgcgcgcttcagccagttcatcaatcgcatacatcagatcatcggccgtgttatagaaatgaggcgccagccggatgatatgtccgctgggtgcgcatacgatgtttttccgcctcaacagcgcagccgtttccgccgctttttcatcccgtatggagatcatgccgggtctgtcatcggcagacggcggccctgtgaggtgcaaccctttttcaaaagcgtattcacacgcaaatgcgctgagtttttttacttcccggtgaatgcggtctgtgccggcatcgttcactagagataaagccgcctgtgccgcatatatgctgataaatgccggggttccggtctcaaagcgtttggctccgtccgcataagaaaaacgggttatatccagcatcgacgcccgctgctgcccgaaccacccggtgactttcggcttcagctgttcggcgagttcctttctgacataaagaaacgccgttcccggtatgccgagcatatactttctcgcacccgcggccagcatatcaactccccattcttttacatcaatcgggatgtgccccgccgattgataagcatcgacaaaaagaagcgatcccttctttgcggatatctcggcaatgcgcttcatatcctggacaaaaccggacgtatatgacacatggggcacacaggtgaaaagcgtctgttccgatatgtacgtctcataccgctctaacgggatcattccatcttcagacggcacgactgaaagctccatctcagtctgtgccttcaaaatgtgggcgatcgccggaaaatccaattccgtatacaccgcctgtttctttcggcaatccggtaaagcagaaacgacggcagagacagcagccgttactgaaggtaaaacggcgatttcttcaggatgggcgccgatcaatttcgcaaattcacaccttgcctgctccgttcgtccaatggcttcttcccagtttccgccatgctgaagcaggctttcctgatagtcattgatcgcttttgaaaccggcagggcaagagcgctttgagagcagctggcgagcatcgtatgtgtgcggagcgccggaaataaagatcggtattgcaccagaggcgaattcaagacatgtttcccccttcggcaggaatatatgtccattatagagtatggtaaaaagaaaaggagggttttatatggagaaaaaagtattgctgacaggctttgaccccttcggcggggaaacggtcaatccttcatgggaagcggtcaaacggctgaatggtgccgctgagggccccgcctctatcgtatctgaacaagtgccgaccgttttttataagtctcttgccgtgctgcgcgaggcgatcaaaaagcatcagccagacattatcatctgtgtcggacaggcaggcggcagaatgcagatcacgccggaacgggtcgcgatcaatctcaatgaggcgcgcataccggataacgaaggaaaccagcctgtcggggaaaacatttctcaagacggtcccgcggcttattggaccggccttccgatcaaacggatcgttgaggaaatcaaaaaggaaggcattcccgcggctgtatcctacacggcggggacgtttgtatgcaatcacctcttttacgggctgatggatgaaatcagccgccatcatccgcacatccgcggcgggtttatacacatcccgtacattccggagcaaaccttgcaaaagtctgcgccgagcctcagcctggatctcgtgacaaaagcgctcaaaatcgccgcggtgaccgccgcggcgcatgaggacgatattgagaccggcggaggcgaacttcactaagctgcagacgccgcctcggcccatttcttccggtaaacgatgcgggacagcgtcacactgatttcatagaggacgagcagcggaatcatgacgagaaagtcagacataaaatccggaggcgtcatcagcaccgagacgacgatcagcacaaaatacgaaagcttccgcgcctttgccagccgggttggattcacgattccgagccgtgtcagaaacatgacggccagaggcatttcaaacaaaaatccgaacggcaatgtaagattcagcataaaggtaaaatacttgtccgccgtaaataccatgtcaaaatggccggcggataattgtgttaaaaatccgagcacaatcggaaacagcacaaaatacccgaaggaaattccgatgataaacaaaaccgaaagccccggaatgtaaagcaaagcggcgcggcgttcaaacggggtcaaagccggcgccgtaaaacgccagagctgaaaagcggcaaccggaatcgctgccgtaagggcgcatattcccgcaatcatcatatacacccataaaatctcgctcggccctaaaacggccagcctgccatccaaatccttgatcagccagtcataaatatcctgcacaaaccagcaggcgccgataaaaaacacgagaaaggcgataacggttttaatgagacgctgccgaacttcctctaaatgcccgatcaagtgggtttcttttttatccaatcgtacatcctccttatagagaaagaggcagaagcggattcgtctgcccccatgtcaggattcagcctgccgttttgtctttctcagccgtctgcttgtccggctcttcatttgagaccagtgtttttgcggcgcttttaaattcaagcagcgtgcggccggcggcacggccgatttccggaagctttgaaggcccgaaaatgatgagagcgatgacgaagatcaggatcaacccgggaatgccgatattagaaaacatgagtgtgcctccttattgtgagattttggcccgtttctttctcatttgcttttcatgcgcattgttatgggcgaagaaacgatcctcttccacctcatttgactgctttacaccgcctgcaaccgcagcttgagagaccttccgaatccccgtctggtctttctgataaatgaatgaagcccgcgtggatacctcagcccccggctccgtcacgtacggcaccactctgtaatccgctctccattgggcaggggtcaccgtacagcggacatagccgcggtaatcgttgaaaaacttaatatgcgggttttgttttaagatctgatccgtatcggcccgtttatccgctccgtttcctccagatgtaatggaagttccgacgaattcggctccgaaaatctttgaattcgtttgattaaaatcggtatgcaggtttgacgcccagcttgcgtgaacatcacccgtcagcacgatgacattgttcaggtttttgctttttataaaattgatgacccgctcccgctgagccgggtagccgtcccatgaatccatgctgtatatcggattggcggttgttccgaaattccattgcgcgaaaaagatttgctgcgccagcacattccacttcgcttttgaggcggctaaatttccgaagagccattgctcctgttctgtccccatcaatgtacgcttcggatctctccactcatcagaaggcggcttattcccgtcgccgttggcctgatcatctctgtactgtcttgtatcaagcacattgaacgatgctaaattgccataagaaaattgcctgtacagccgcatatcaggaccgttcggcaatgacatgcgcctgagcggcatgtgttcataataagcctgataagctgcggccctcctgagcacaaacgcttcaacggattggcctttttcagggataatattggcataattgttttccacctcatgatcgtcccacgtcacgacccacggaaatgcggcgtgggcggctttcagattggcatcagagcggtattgggcatgacggttgcggtaatctgacagtgtatacacttcagcgctgctgtgcgtcctgacatttcccgtttttgacacatattcgttcggtccgtattcataaatgtaatctccgagatggaccacgagatcaagcttttccttcgccatatgtttatacgccgtataatagccgtgttcatactgctggcatgaagcaaatgcaaacgtcatggcggatacgtcagcaccgggagcgggcagcgttttcgtccggccgacaggactgagctcatgcccgcttttaaaccggtaatagtacactttattgggcttaagcccgtccgcctcgacatggacggagtgtccgagattcggcttggccatttccgttccgcgtttgacgatgtgacgaaaatgttcatcagcggcgatttcccattttaccggcacggcctgcttcggcatgccgcccccattcagcgggtcaggggcaagacgcgtccagagaatgacgctgtcagacagcgggtcgccggaggctacgccgagggtgaacggatagtttgaaaatttcggagcggcattcacttcaaacgcgccgatggattgcgcgatcgctaacccgagggaaagaccggcgattttcccggcgccctgtataaatgcgcggcggtcaaacgtattgttctgaaagcttttgttctccaattccttgatccattcatctaaacggccgtcatgtgtcatgtcagttcccctttcgtctcattgatcgcccttattataaaaaagaaatgttaaaccgctatgaagaagtgtgaagagtttgtaaggctgaaaaatggacggcgggagacatttttcacattgtttcgacaaaccttgccccgccgggagaaaaccccctctgtttgtttttggcttgtcatccgtcaagcgcacttttttcctatttttcttcacaaaaaattaaaaaaacaccgttcattctcagaacggtgcgcccgggattaaaatgtattgtacacgttttcgcacgtctcacctgtcggctgatagaagcagtgggatttgaatctggcgacaaacggctggccataccaagtctgcgggcagttgcccggaggcttaaaataccacagactgaacttagccggccaaaaccgttctccgttaatcgtccggcgggcaagcctccgctcggattcacgcggtctctggtaaaagtatccgtgagtcaccgcttcaaacgcgtgcggctgaaacaccatctgcctgatggtgcgcaggcctttaaaatcagaacaattcgcccgcacccgattgattcccacattgccgaccaaaagcattccctgcttcccttcgccttccgcttccgccctgagcagccttgccattagatccagatcggcgctcgacgcttttacgactgccatcatgacacctcccgtattttctcccttcatcatattcagccgcggcccagtgatgacagacaaaagccagaaaacaaatgttcacgaaaaaagggtttatatttcacgttatgaggaaacatattaacatgatttccataaggaggaattcgcatggaacacattaaagcgcttgccattaaaggcattatgaccatcattattctgtacctgatactcggcttaggttttcgctttacattcggcgacgtgctgctgatgaccattgtgctgggagccgtttcctactttacgggcgacctgtacgtgcttccgagatggaataatatcacggcggcgtccgctgatttcggaatcgcgtttcttgttgtctggctgatgggaatgccgctgtccatgggcatttccggaggaagactggcgtttgccgctcttatttccgccgtcatcatcgccgtcggagaatattttttccatatctatctgatgagaaaagacttgggcgggtcccgttttttagaaccccggtccgaataacgtaaaaaaggccggataaaagcccctttaaagggggctttttatttgtaaagtataaacgctttatacatcttgatataactgataaatccttttcagcctttcttcgagctgttcaaaatgaacaaagcgggcttctctcagaaactcagtcccatcaatgaacaaaagaagcacggggacagtgaagactgaaaatctgccggccacctcttctacctcgtcagcattgatatgccccaatttgatattcggaaactgatccaatacgtttctgagctgcggcagaacagcgtgacatactgtacaggcgggtcttgaaatgtagataaaactgaattgatgctgtttaataaaattatcgatagaatctaatgaatgtaattctgccatctctttcatcaaaaccctcctccaaatcggctcgtctttcatgaccaagctcatcaatacgcgtacatccactatacacatttattttgaacatatccgcttttttgctattcagagcacctgaacgttgtgcttgaaaaataaaagaacagttaccgcttttcagttactgttcttagatacttatattaaaaatgcagagcgtactcccctgaaccgatgagtgcaactccgatggagactgcaaccagcaccaagttatattcaaaaccgccggcaccgttggcaaatcctttcgctccatggacttttacgatggcacctaacataataatcgttataatagcagctccgagcgggaggaaaacacctaaaataaatagaattccgcttgcgagttccccgagacctgataaagcggccgcggcattgcctggtttaactccaattgactcgaaccattgtccggttcctttaattccgtatccgccaaaccaaccgaataatttttgtgatccataaaacagaaacaccacaccaattatgattcgaataagtaatagtcctgcatcttccattgttatctctccttatttttcatattatatgatgtctgcaaggcagctgtttaccaacagtcgcttccagcaaacatctgttaaatgtatatctttttatttttcttcatgcttcacgttcatctatcaatcaacctaattctctcacttcaaacggcagcagccctagttcaatttgtgcccggtgcggttcatactgctcagggagcatcagttttccgcccattgtttcttgggactcatcatgggcaaagcccggcggatcagttgcgatctcaaataagatttccccgtgttctctgaagtaaactgcattaaaatagtttctatcctgaacaggagttacaccatatccgtgcgcagcaatgaacctttgccaatctaattgatcttcgtcatcctgagcccgccaagcgatgtgatggaccgtgccgacacccatttgcccgcggccgataggcgttaacttaaggtcaatcacatttccgatatcaccggcagaacgataacgaacgaagtcgccttctttaccgactcgctcaagccccatgatgttttccagcagtttacctgttttttcaggctgtgctgataacagggtcgcaccgccaaagcctttaatggcaacatccggggttacatctccgaacgtccatgtattggcttctccttcttctctttccacgatttccaagtgcagaccgtgcgggtcatcaaattctatatattgttctccaaaacgctcgatttttgtgtatggaatgttgaacttttcaagtctcttttcccaaaacgccacggcacccttcggcacggcgtaagatgtcacgccaacctgtccgtctccaatgatgccttggcgggcgcccgcccacggaaagaatgtgatgattgttcccggcttcccgccttcatccccaaaataaaggtgatacgtacccggatcatcaaaattgaccgtttgcttaaccaatcgcagccccagcactccagcgtagaaatcagcattctcttgagggtgaccgacaattgccgtaatatgatggatgcccatcgtttttttcgccatttttatttgctcctttacaaatagttaaatatactccacaaactcattcacaggctttcggtagccgcgcggccttctgctttctattttttctttcccgattgtaatcatcatgacgacctcaaattgatcatctatcttcaaaatctgtttcacggcttcagcatcaaaccctatcatcggacaggtgtcccagcctttttccttagcactcagcataaacatcatcgcagaaattgaagcatttcttatcgcctcatctctcttaaatggttctcccctgttttcataaaacgaaacggtgtcttgaaccatgtgatcatactcttgtttatttaatacccccagcatcttcaatccttcatagatgtcagccgcttgctgatatgcctgcttatcccctaaaaccaaaagaacagctgatgagctaaacactttatattgtccgtttgcggcctgtttcagcttttcttttacacccgggtcaagaaccgccacatattttgtatgctgcaaattaaaagctgatggagccaacgcaaccaattcaaacatttcattgagctcgtctcttgtgattggatgttctggaagaaagttgcttgcagatcttctttcattcactagctgtacaaattcagccatttccctcgcaccccttttatttcgaattcgagatattatcgtataaaaaatcaaataacatatgatcaaaaacgaaacgttctcttcactgatcttttcgtgattcaaacgatcggcaggttcttatcctgcacactaattaaattatctcgaattaaaatatcttgaattcaagataataataaaagataaacactcaaatgtcaacagttctttttttaattcagccccaatttgtctgtgtactgtttagccctgctccaactttttttctgtcaccttatttattagtaaacaggaaacaaccttgctatagacccactcgaaactgaattggtacgataagcaaagtgattacacaagaaaggatacggagagcgaatcaaaagcgcctctatttttttgtgcagttttataggaggaaaaaatgacaagtgaaagagaacaaataagcaaaaaagttgctttgattgcattgatagccaatctgatcttaatggcaggaaagatcttttttggactgataggcgatagtgaagcagtttttgccgacggtatacattctgcagcggatgtcgcggcttcaattgctgtcctggccgtcatcggcatttctaataagccgcctgatcaagaccatcctttcgggcatggcaaagctgaggtcatcagcgaagcgattgtaggaatcatattagtgctcgtttccgtgtatattctgatagaagcgatttcgtcctttgttgaaggtccaagcatcccgcaatacagcgcattgtttgcggctctgatatcctacgcggctaagcagatcttatatcgttattcgatcaaacaaggggaaaaatggaacagtaaagcgattatagcgattgcatacgatcataaaggcgatatcgttgcctctcttgccgcttttatcggcgtcctattggcgattatcgggaacacacgcggatggtcctatctgttgtacgccgatgcaattgccagtgtcatcgtggcgtacctcatttttaagatttcaatggaattaatcaggccgtctgttgacgttctcatggaaaaaagtgttgatcccgaactgatagaggaatataaagccgttattttgcactgccctcaagtcaaacggctcgataaaatccgagcaagagaacacggccactataaattgcttgatgtccggttatctttggatcatgatttgacgattaagcagggacacgatattgcccgcgaaatccgaaatgaaatccaaagacacttttcagatgttgaagaagtgctcatccatgtgaatccttattttgaagaatgaaaaagcagcttgtagagaaaatgatgtttttctacaagcttttttgttttgtgctgtttctttacatattcatttgatttcaggtgcagaaaaagcactcccgcatgcctagccttgcttggctgggtatgtggcaatcttccacatcattttgaataagatcagcggatcaagtgagcgctgcagtaaggtttgaccttttcaacgatgaaagagaagtctatgtatttatcaatttttcgaagaaggtgatcctcttcgacgagttggtcaaacagaacgaattcggctgtgttttgagaaaaatttcttgtgtggaacatgggaaagaaaccgttttttcagtctttcttttattttatgacaagggaaacataaaggctgtcgagattttctcgacagcctgaaggccggataacggcctttttcgtttgatttcactgatcaatatgctttctgataaaatgcagcagcgtgtttccttgagcggtcaatatgacgcccttcgcgccgcacttcggacagggcgtcccttccttctcctcgccggttccttcacaatgcggacacgtgagctcaagatcgtcggttgcgatcaccatgaatatccctccttttttgattatctgtccgtctccagtcactttccatggccatcacctccttaacaacacaaaaaaaccccgtccatcaaaggacgaggttttcgcggtgccacctttattaacggctgaagagccattctctcaaaaagtacagaaacacacggtttcaatactcctttcttgataacggggaaagaatcccggcaccgcctactgtcatttcagcgcagcaattcagaagcccattcggcaccggacggggatcggttcacagcggccaccgactctctgaaccccgcgcgctgatgcgtacttactcttcctcagcattgttcatccgttcttttattttaaaatgtatcatacgctgtcatccggcggaagtcaataacctttcggatcggacaggccgagcatgtcccgcgccatttgcatatgctcctcttgccccgtctgaagcgcgaacttcgccgtttccgcagggtaagcggcctgccattctgtcacatgctcctgcattttcggccagacgcgcccgccttcagcttcgcagctcttcatcagccgttttgtttctttttctcctaatatcacttgataaaggacaaaatccttggccggatcggcaacctttgcctccgtccaatcgaggagacccgtcacacgctgattttcgccgatcaaaatatgcggaggatgcaagtcgccatggatcagcgcggaaaaaacaggccattacgaactgtcatttatccacgtttgccatcttttccaatgccagcttaccggctgcctccgctgacaaattttgatccttcgcgtaaatctttcgcctccaaaaagaagacgtgaatgaattttttcatattcactttaaccggagaaagcggcgcggtttccttagcctgcatttctttcattctcttgctgacagcggggaaatcaaagaatttcgaggcgtaatattcaaatttagggtttgaaaaatcagttgtgcccaatgaagcgaaatggtttaacgaatgaatgacggcccttctgatccgctgttccgaggctttgatttccctgttaacctcggcttgtgccgccgcaggccccagcttccggatggcgacgtttgtaaacatctgctttaaagacgggatgtttctttccgcctgttcatcctcaaataaatagtgaaggacagccatgaggtcatgcgccccgctttctcccacgatgcctaattccgataaaagaaattttcctgtttctttgattgatttctcgtgcatcccccccggcccgctttttttcggctcattccgctgaataagacggcttaacgagtgttggatgtcgccgatcgaggtttccagttcaatccgctcttttacttttcgcaaaacggtgacaatctcgattttgttgatcggtttgtggataaagtattcgatgccgagagaataagcttctcccaccatttcctttgcctccacctgcgatatcatcaccgcttttccgttgtacgatccctgaagatgccggatcgtctcaatcccgtcccgacccggcatcagcagatcaattaataaaatatcgacttgtttaaaatggagataatgcccttcaatctggcttccgtcctctgcctcaccgacgacttcgcctaaatcctcgtcctcgatcatctgttttaaaatggaacggatcgcccggtcatcatcagctataaaaaaacgcatattatgagttcatcctttctgcaatcaaatgcttcaccggcagtttaatcgtaaatatgacgccttttggcttgttatgaaaggaaatgtctccgtcaagttcagttacgatttccttcacgtaagtaagcccgatgcccgttgaaggtatgccgaattcatcgtatttggatgtaaacccgggatcataaacgacctctcctattttttccggaatgccggggccgtcatcttccgcctgaaattcagccttttctccttccgccctgcgcagcgcgaggcggatctcacccctgtcacccatggcttcgacggcattggcggtcaggttatttaagatcgacaggacggtaaagacgtgataatcgggatgctctccttcaatcacgctccggaattgaatgtccttgcctaaagattcggcgtatttttcattgattcggatgacgatgccgaccagatcggcggcattcatgtaatcccggaatctctcattggaaatcagcttcgacaaaccggcgaatattcgctgattgtcttttttcacttcatgaatttctcccgcaaggcgcagcattcggctcccgagctcccggtcgttcccgctcatttcccgatatagctgataggattctttcgtcacatgctccgtcgttttcagcgtttttttcaaatgaatcgtttcttcatataagttggacacaatcatcagcatgtgctcatgctgctttctcgtttgtttttccctgacctgagattcgtgcagcttcatcacgttgaaaaaactcagcacaataaatgtgtgagaaacagcgataaccgcaatatccgccagcttgtccggcatcataatctgccggccgccggaaaactgaaccgtcatttcaacggcatcggacgcaatttcaatgagaaaaccgagaaacccgatcatcagcggccgatcccaaaaaagcctgaccttcagcacataaaacaagcaggcatatgtaaagtaaaaaaagaaactgggatattggctgaaaaaagcctccgtaaagccggcatgctctcctccccagcacgccaggccgatccggaatgccacaacggctgcacctgtcaacagccctgacaatactgccggcacatgccgaagcagcagcagaaaaaagaaaaaagccggggcgccgaagctgatccgatatacctcattcagggggtaaaatttcagttcccccgccagcggcacggtgatcagcataagggcgaaaagatagccgtcttttttcagtaaatagtcgagcctgatcataatcacttccttcttctgtctattttgaacaagaccgatacagtccgcaaatttctttagacccgaatggcgggacactccggctgatttataaatctatcggcttattttaagaatgattttgtcgtattttgtatgattctgtagatgtcattatacattatcatggaacacgctatttttgaaaacgttttccaagaccggtttccgcttcggacaggcttgcaatagaggaggaatgttatgaaagatatggtcagagagcgccttgaaaaagaggaactggcttcacttttacaagattgggtcgagcattaccgaccgttttccgtcaatggaaaaagcgcaaattatatacccgccctcggagaaatcaacgactctcagctgggcatttgcatattagagccggatggctcaatgattcatgccggtgaatggaatgtcccgttcacattgcagagcatctcaaaagtcatcagctttattgccgcctgcatgaacagaggcatttcttacgtgctggatcgtgtggacgtggaaccgacgggtgatgcgtttaattctatcatccggcttgaaatccataaacccgggaagcccttcaacccgatgatcaatgccggcgccattaccgtcgcctcgctgcttccgggtgaaacggcgcatgataaattagaatatctcttttccgtttttgaaaaattaataggaaaacgccctcacattcacgaggaggtcttccgttctgaatggcagaccgcgcatcggaaccgagcgctcgcctactatttaaaagaaacgaactttctcgaggcggatgtggaagaaacgcttgaagtgtatttaaagcagtgcgccatggagggtacaaccgaggacatcgctttaatcggattgatacttgcgcatgacggataccatccgatccgacgggaacaggtcattccgaaagatgtcgcgaaactcgccaaagccctgatgctgacgtgcggaatgtacaatgcgtcaggcaaatatgcggctttcgtcggcgtcccggccaaaagcggggtatccggcggcattatggcattggttcccccaagcgccagaagagaacagccttttcataacggctgcggcatcggcatttacggtccggccattgatgaatacggcaacagcctgaccggcggcatgctgctgaaacatatcgcacaggagtgggagctcagtattttttaatcaaacgaaccaagaggtgattggatgcaggaattccttgaaaatgtaatcggctcggcaaatgattttttatggtcaaaactgttaatcgtactgcttctttctctgggactgttttttacgttcagatcaaagggtctgcaagtccgcatgctgaaggaaatgatccgggttttgaaggaaggcgcggccgcccggaccaaaaacagcatttccccgtttcaggcattttgcatcagtatggcggcgcgtgtcggaaccgggaatattaccggaatcgccattgcgatctcactcggcggtccgggcgctattttctggatgtggattatcgcagtcatcggttcggcttcaagctttgttgaaagcacgctggcccaaatttataaagtaaaagatcaaaacggattccgcgggggcccggcctattacatggaaaagggcctgaagaaacgctggatgggcgcgctgttcgccgtattaatcacactgtcattcggggttgtttttaattccgttcaatccaatacgatcagcgtcgcctttcaaaacgcattcggcaccagccggcttacattgggcattattttaatcgtggttttcggcggcgtaatcttcggcggcgtcaaacgaattgcgaaaatggcggaatacatcgtagtcgtcttggccgttttatatatcggtgtcgctttctttgtcattctgacgaacatcacccaattgcccggcgttctgtcgctaatcgtaaaaaatgcgttcggcattgatcaggcagcgggcggcgctttaggtgcggccttgatgcaaggtgtaagacgcgggattttctcaaatgaagcgggtatgggaagcgctccgaacgcggcggcgacagctacgacgagccacccggtgaaacaggggctcattcaggcattcggcgtcctgacggatacgctcgtcatttgtacaagcacggcgcttatcattttattttcagacgcgtatcaccagccgggactgagcggcatcgcgctttctcaggccgccttgagcgatcatgtcggcgcatgggcgtcaggtttccttgccgtcttaatgcttttgttcggcttcagcgctctgatgggcaactattattacggagaaaccaatatcggatttttaagccagaacaaaaaatggctgttcatttaccgcatctgcgtgctcggaatggtactgttcggctgtatttccaaagtccagcttgtgtgggatatggctgacttattcatgggcttaatggtggtcgtgaacttaatcgcgattttccttctgtcgaaaaaagcgtttgccgctttgagcgattatgcccggcaaaagaaagccggaaaggaccccgtcttttacagagatgtgctccctgatgatgacgggatcgactgctgggagtattcagacatcgcgaaaagtgcgaaaggcaaacacatttcctaaacaaaaagtgttcgggcagcgtcctgaacaccttttttctgccggttcattgacaaagagaatagcgtccattaccctttttatatattttcagtaaagtcagaaaggaaggcctatgaatcccattacacaaatattaaatgaatacccggttatgatcatagacggcgcgatggcaaccgagcttgagcggatgggctgtgatttacatgatgatctgtggtcggccaaaattcttttggagagaccagaactgatcaaacaggtgcatgcagaatattttgccgccggcgctgattgcgcgatcaccgccagttatcaatcgacaatcgaaggatttgcagcgcgcggcatcccggaaaccgatgcgatacgtctcattcagacatctgttgaacttgccgcacaagcacgcgatgaattttgggcgcatgaagaaaaccgtttacaccggcccaaacctttggtcgccgcttctatcgggccttacggcgcgagcctcgctgacggctcagaatatcgcgggcattacggactgacggaggatgagctgatcagctttcaccgcccccggatgaaagcccttatagaatccggcgccgatcttttggcctgtgagaccattccgtgcctgtcagaagcaaaagcgatcacaaggctgctggaggaattccccggcacttatgcatggatcagcttcagcgccaaagacggacggcatatcagcgaaggcacgccaatttccgaatgcgcggccctgcttgactcctgcagccaaatcgcagcgatcggcatcaactgcacaacgattgaacatattccgccgctgatagaagaaatcaaacggtcagcatccaaaccgattatcgcctatccgaactccggcgaacaatatgacccagtgacaaaaacctggaaaggcgcaacgtgcgaaaaccatttcggaaaaagcgcgcaaagctggtacgaaaacggcgtgagcctgatcggagggtgctgccggacgaaacccgcggacattcaggccattgccgattgggccaaaaccttaaaaacaacttgactaatcggaatagtttgtatattctattcaaaaagccggttcaccggaatctcgtgccgttcgccggcatgagattttttattagaacggccctcgcagaaagttggaaaacaatgaacaacaagaacgagacgaattttcagagaagtatgaaaagcagacacctctttatgctatcactcggaggtgtgatcggaacggggctgtttttaagctctgggtataccattcatcaggcgggtccggcgggcaccattttcgcttaccttttgggcgcgggcatcgtctatcttgtcatgctttgccttggtgaactgtcagtggccatgccggtgacgggcgcattccacacctatgcgaagacctatatcgggcccgcgacgggctttacggtcgcatggctgtactggctgacgtgggcggtggcgctgggctctgaattcacggcggccgggcttttcatgcagcgttggttcccgcatacttcggtttggatgtggagtgcggtattcgctcttttcatctttttattaaacgccttctccgtgaaattttttgctgaatcggagttttggttctcaagcattaaagtcttagccatcttactgtttattttattgggcggagcagcgatgttcggcatcgtcccgatgaaaagcggtgaggccgcacctatgctatcgaactttacggatggcggcagcctttttccaaatggctttttcccgatactgatgacgatgctttcagtaaacttcgctttttcagggacggaattgatcggaatcgccgccggggaaagcgccgatccggaaaaaaccgttccgcgcgccattaagaccacagtctggcggctggcgcttttctttatcggaacgatttttgtgctgtcagggatgatctccatcaaggaagccggtgtgattgaaagcccgttcgtcacggtatttgacagagtcggcgtgccttatgcggccgatctgatgaatttcgtcattttaacggcgctactgtctgcggccaattcagggctgtacgcgtcatcacgtatgctgtggtccctgtctaaagaaggggagcttcatcccgcctttgccaggctgacctctaaaggcattccttttaacgctctgatcttcagtatgatcggcggcattctgtcgttgttgtcaagcgtatttgcagcggatacagtctatcttgttctcgtctccgtctcaggatttgcggtagtggctgtgtggatgagcatcgccgcatcgcaatttttgttccgaagacggtttcttacagaagggcaccagccttcagacttgaaatacaggacgccgggatatccggccgtaccgatagcggcctttctcctgtgcctcgcctcctgtatcggcatcgcttttgatccgaaccaggccatcgccctttattgcggaattgcatttatggccgtttgctacaccgcttattacttgaaaaaccggaaaagcagagcccgcgtgcaagccgtaaaatcccaataaccaaaaaaagaaccctgcagcgcaagggttcttttttcatttatacttcaaccacccatctgaatgaatcccgcaccttcccgacttggatgccggcaatcgtttcatagagcctttctgacacttcaccgatcaaaccgttattcagttcaatcgtttctccgtgaatgtgcagcgcgccgaccggtgagatgacggccgcggttcccgtaccgaatacctctgacacctcgcctctcatcgcagcatcatagatgtcatcaatggcgacctgttcttccctgacgctgatgccccagctttttaacagctctatcacagatgcgcgtgtgatgcccccgagaatgcttccgtttaacgccggcgttacggcctctccgtttatgatgaaaaagatattcatactccctacctcttcggcatatttcttttccaccccgtcgagccaaagcacctgatcataccccagttcttcggctttccgctgagcctgtaagctggccgcataatttccggacgttttgacgtcgcccactccgccggtgacggcacgcacatactcatcctccacataaatccggatcggtttcagctgatcgccgtaatacgaaccgacaggcgtcagaacaaccatgaacttgtaacgctttgacggccggacgcctaaagaaggctcagtcgcaattacaaacggacggatatataaagaggttcctttttctatcggtatccattcctgctccagctccaccaattgtatcaatgcctccagcgccagcttctcgtcaagaggcggcatgctcatccgccgtaacgatttattcagccgttttatattttggtcaggacggaacatcaacacccgtccgtcttctgacctgtaagccttcagcccttcaaatacggcctgcccgtaatggaaaaccgatgcggaaggatccagatgaaccggttcataaggggtgattctcggatcatgccaccctctctcctcttcgtaatccatgacaaacatgtaatctgtgaagtacttgccaaaccccaatgaagcggagtccggtttttcttttcttgctgtgaccttacgtctttcaatcagttgattcaacaaaagcacacctttcttataattgttaaaattttcagtcttttataagctgcctgttttctctgcctgaatcgtgtatgcacagatatatgaggatgcagttgaccgtatcatatcaaatataccacttataagaggataattatcaaaatttttgatattttcaagcgaaaatatctaactttattttattctgcttgatttttttcaatgaggactttctgtcatattaaatgattgcgcttacataatgtaaagcaatcctttctttcgcacagtcaatcatgtgacaaatttatggcggataggaaggtggttgccgcctgcttcacgaattacgtatgaaatgcgcaagtaaaagggggattcgcttgaaaaaatttatcgcattccagattttgatcgctttagccatcggagcattgatcggccatttcttcccggatttcgggatggcgctgcggcccgtcggagacggatttatccgcctgattaaaatgattgtcgtgccgatcgtgttttcgaccattgttatcggagccgccggcagcggcagtatgaaaaagatgggcagtctcggcatcaaaacgattatttggtttgaagtgattacgacgcttgttctggcgctcggtctgttgttggcgaacgtgctgaagccgggagtcggacttaacctctctcatcttgctaaaaaagatattcacgagctttctggctatacggaaaaagtagtcgacctgaaacaaatgcttcttgatattatccccgttaacatcattgacgtcatggcgaaaaacgatcttctcgccgtcatttttttcgcgattttattcggtgttgccgcagccggcatcggcaaagcctccgcacctgtcatgagtttcttcgaatccacggcaaatattatgttcaagctgacgcaaatggtaatggtcaccgctccgatcggcgttctcgccctgatggccgcctctgtcgggcaattcggaatcgcgcttttgcttccgatgctgaagctgatcggcactgtgttcctcgggctgttcctgatactcttcgttctgtttccgatcgtggggcttatctttaaaatcaaatactttgaagtgctgaaaatgatttgggatctgtttttgatcgctttctccacgacaagcacagaaaccattctgcctcagctgatggatcggatggagaaatacggctgtccgaagcgggtcgtctcctttgtggttccgtcaggtttatcgctgaactgtgacggctcaagcctctatttatcggtgtcctgtatttttctggcgcaggcgtttcatgtggagatgccgctttctcagcagcttctgatgatgcttgtcctcgtcatgacaagcaaaggtattgccgccgtcccgtcaggctcactcgtcgtccttctggcgacagcgaatgccgtcggtctccccgcggaaggcgtcgccatcattgccggtgtcgaccgcgtcatggacatggcgagaaccggcgtcaacgtgcccggccatgcggtcgcctgcatcgtcgtgtccaagtgggaaaaagcattcaaatataaaggacccgtcacggcagaccagaccgcccggacagaaagtatgtaaacacaaaaaagaccaccttattggtggtcttttctattaatcaatcgccgcatgatcctctttctcaatcaaagcaaggcgttcattgatttcttcctgagtcatttcgtgctctttcacatacatgttgcgttcgttcgtacggcattcgtgactgcagctgcgcatgtatttgtattcattctcaggtgtgcagatcatttttttattacatgccggatttgcgcagttcacataacgctcgcacggttcgcccgtgaaatagtcttttccgatgataacgtgctctacgcggttgaccggtacgctgattctttcgtcaaacacgtagcactgtccgtcccacagctgccctttcacttcaggatctttaccgtaagtgacgataccgccgtcaagctgggacacgtcttcaaagcccttcttcagcagccagccggaaaatttttcacagcgtacgccgcctgtgcagtacgtgagaatttttttgccttcaagcatgtctttgtgctcttcaatccagtccggcagctcacggaacgcctcaatatcaggtctgaccgctccgcggaaatgaccgaggtcatactcatagtcgtttctggcgtcgatcacgatcgtgtcaggatcctgcatttgctcataaaagtctttcggtttcaaatgcttgcccgtcgtgacattcggatcaacatcatcttcgagacgaagcgtcaccaattcttttttatggcgcacaaacattttgcggaatgcatgtccgtcagcctcgtcaattttgatcggcatgtcggcaaagcgcggatcagctttcagcgcattcatgtattgttccgtctgttcaaccgttccggacaccgtaccgttaatgccttcctcagaaatcaaaatacggcctaacagaccgagctccttacaaaacttcaaatgctgagccgtgaactcctcaggctcatcaatctttacatatttataataaagtaaaactctatattgtttttccatgatttatacaccctgttcaattatattaatgatcgcacactctactatatcatacaggaaaacgggcgaaagatgaacatttccgtccgtactctttcttccagtcacgcttcgccttttaaaacctgctgaaaataaaaccgatatgtgttgcgcaaaaaggtctcaagcgaaaggccggccgcggtctgatacttgccgataataaacggaaaacggtcacggccttttgcccgcagaagatcggcgctgtcttcagccagttctgagatgagcgcctcaacgacaggccggcatgcgtcccgcacggcttcaagaacttgctgatcccctgtatgccggtactgttctatcagctttgccaaatccttttcttccataatgttcacttccttacaccatataaaaaagaggagcagcttttataaagcggacgcctcctcctgtgactccgcataaccgatgatctggccgacctgtaattcacggccttcagtcaggttatccgaaggggtaaacatatctttctcgaatactaaaataacggtcgatccaaatgaaaaatagcccagctcttcccccgtctcaagcctgtttccggtgtttgtctgaacgatcgagttaatattcatcgcacctaccggaatcatgagcatctgctggtcagcacgggtcagctcgtacacataacggtaattttttgagagcacatctttcccgtactttaaccccatcgtattaacgggataggagcgtttccccagctcggccagcttctgatacgtgcagctgacgggagaatggaagcggtggtaatgtctcgggctcaggtaaagcacggcaaaacacccgccgttatacttgtgatcggcgcttttaaaccccgtcagttcggcgaacgaataatccttcccttttaccatgaaagtttgattaggattaatcatgcccaccgtctgaacgacgccgtccaccgggctgacgatggcgttcttctcttttgccacggggcggagattcaaattaatatcacgaatgaaaaatgacgccagtgaatcaaagtcagaagccgtgcgttccgtttcattccagttgatgcgatagtgtttggaaaacagcggaatcatcggcttgctcagtttcgattcacagaagtttttaatgagataagacgtcaatcgattattagtcagttcaatcaatgaacggtaaagaactttagcggcagtattaaacattgattactcctatgaattttcctatagtaataaaaataaaacaccataaaaacgctccgatggcggcgaagcataagtaggttttgaattccattctgccgattccggaaaagtagcaggtcacgtgtctgatgccggggatgaaataacctaaaataatggtgtacggcccgtacttcttcatccacctgtctactttctccatcctcttttccttcaggccgacccatttcccgaacttattaataaacggccggccggcttttctgccgatgaagtagctgataatcatcccaaggagcgctccgataaagctgatcagaatggagagcccgtaattcagcacgtttatatgagcgaagtagcccacaagcgtcatcatgacttcatccggaataggcaatccgataataccgagtgtcagcataagaaaaatcgcgatatatccgtaatcggatattaattgctgaactaattccatcttctgctctccaggttttcaggcgcctgttttttaaaatgcggaaatttaatgttgctgaccattaaataaccgagcgcgatcgttcccgcccccagaagaaaagcgttattgataaagctcaaaatgacaagacacatacccgcaaacggaatcggcatcccgataaacgtcggcagcttgctttgttcaatattaaatctggaaagacggatcatcccgcagatgctgtaggaaagcgcgattaaaattccgatgaacggaatcgtatatagtgaaacactgtaagcgagcatggacggcgccacgccgaacgtcacaagatcagcaaaagagtcaagctcccttcccatctccgataccgcgttcagcttacgggcggccaaaccgtcaaagaaatcaagaaacatcccggtgaaaataaagatcaccgcagagtgtatattatgatacaaaagggaatgaatcgataagagcccgcaaataaaatttccaattgtaatcatactaggtatataattcacagtttacacaaacccccaattaaaaccatatcaaatcggactgcgtatgcataaaggctccattttacggaaacataaaatgaaattctttcaatgctatcattcaaattcttttattatacagcatttggtgttatttgaacaatctaatctggtgatttttgttttttcgccgttcatattaaggtaagcaatcatggattcctctattccggattaccctgcttcaatattccatgccgcgatgcggattgtccgttcttgatgaatgaaaagccgtatgatgtattgttatttccttctccgtgaaatgagaacattacatataacgattgcggacataaaaagtttcatgaattcaaaagccggcacaaaacggcctcatacattatctcacaaccccgttttccagtatatagtctgccaaacaaaaaaggcgccttaccattacggtaaaaacgccttttaagatcattttatgtaattgataaatggctgagtgcttcggccgctctttccctggcttcttcaacggtctcagctgcagaaagcgcaaccgccatacggcgtcctactttcgtgacgggtttaccgaatacgcggacctgagtgctttttactgccaaagctttctccaaaccttcaaccgcataatcagcaagctcttttggcgccttcagcggacggcttgcccccggcgacagctgaatgatttccggaatcgggaatcccaagaccgcgcggacatgcagcgcaaactctgacaaattttgcgttacaagcgtaacgagccccgtatcatgcggacggggagacacctcgctgaaatatactttatcttcagtaaggaaaagctccacaccgaacaaaccgtatccgccgagctcgtccgttatgcttttcgcaatgtgtttcgcctctttgatctgctgttccgtcatatgatgaggctgccatgattcaatatagtcaccgtctttttgttcatgtccgatcggcgcgcaaaaggacgtaccgttcgccgcacgcactgtcagaagagtgatttctgattcaaacggaatgaattcctcaacgatgacccggccgtttttcactcggccgccttccatcgccatgtcccagcagcttttcagcccggaagccgagcggcacacgctttgcccttttccggaagagctcatcagcggttttaccacgcacggaaagccgattgtttccgccgcttctttaaattcttcatatgtattcgcgaattcatagccggcagtcggaagatgaagcgtctctgccgcaagccgtctgatgccttcacggtccatcgtcagctttgccgcacgcgcattcggaatgacgtgaaaaccttcttcctcaagcttcagcagctcatccgtcgcaatggcttccacttccggcacgatcaagtccggtttttctttctcaatgacttctctgacctgcgctttatcaagcatatcaatcacatagcttttgtgcgcggcctgcatggcgggagcatgctcatagctgtcaacggctacagtgacaaccccgagccgctgcgcttcaatgacgacttctttccccagctcgcctgatcctaataacaacatcttcttcgcctgatacatgtcctttggcccctccctttctataccccactcattataacggaaatattcaaaaaataaagacaagatagatgacaagctctatcctgtcttttgcgctgattcgagcgattcaatcgccgctgacacgtccttctcgcaatattgccccattaaacataacgattcttccgcccggcaggcgtgagaagcaatgcggcgcttggcttcctcatggttgtcaaggatgccgagatcacagaggctgacggggaaaccgagccggaggtaaaacggaagcagctcttcaatctcaggtctccgattctcaagcgcgagctgcaccaatatgccgtaagcaaccttctggccatgcagcacctgatgtgtctcctgaagaaaactgagtccgttgtggaccgcatgcgcccctgccatcctgcacaaacggccgccatacccgccgaccgttcccgcaagcataatgatcgtttccgccgtatggatgaacggcacggacagctcgcctttctccatgcttccgacggccgcttcactgtaacgcaataacagatgacggatatattccgcctgtctcagccccgcctgcgccatcagcggcgccgcctcctccgtatttctgatgaccgcctcagcctcataccatttcgccagcgtatcaccgatcccgcttttcatatattcaatgggagaggaaagcaaaaacagcggatcaacaagcgtcaaatagcttgaacgcttatgataatcaactctgataaaattgccgctctcatcatatatgacactcaacggcgtacttgccgcacacgtccccgcaatggaaggaaccatcacagcttcaatatcaagccggtctgccgccgcttttgccaaatccaaaatcgtgccgcctccgataccgatgatcacatccgcgtcttccgcctgctcacagaccttacgcaccgcctcaggtgaacagtatcctttatgctgaatcacatcccaggaagaaccgccgctgtaatcggagaacgcctgataggatttgattccggtcacaataacgggttttctgaatgtctccagcagccccggaagttcttttgcgattccttccttgcatatgtactgattcgggccgcttcggacgatatcttcaggcttcattcgaatctctcctttggctggaatttatatatattttcccacttatcagaaaatacatcaaccggaggtgcgtcagcgcttcgcttcttccgcctccaaaaacagctcatcaagccgctccaaagcctctgccttttcaaaactgctgaaccacagatcatcataggaatcaaggatgcggtaatggtgggaaatcaaatgctgctgcaagcggaactcgccttttttctcgatggctttccaccacaccttgccgcccatcgtcttccccttcggcctgtcaattgtgcggtgagcaaccgtttcaatgacttccagcggatcatctcctaatacggattgcagtgtttcacttgatctgaaaagcgcgcaaaccgccacaacgtgcggccattccgcaagcgcccgccctttctcaatctgcaccagcgactttttagaaaggccgatcacgtccgccattttctcttgcgtatagcctctctccgaccggattttcttcagctggaccgagacaagctcagtcatataatcttgatccatctcaacctccatatttatcaatatagccattttacaccgcggcacgccttttttatatcagaacattttcaaacgaatcaaaagaacccgggattggcttatcattgaagcgatgtacctttccgcataatccagaatgatgcggtgaatacaaacgtacgcccgaatagacaggtgcaggctccctggcggttgagctccggacaaaataaaaagctgccgcagctgcagcagctaaaactttatagaccggaacatcagcattatgaagcgaatacaatccatcttgcactataattgacacgttttttcgaaccctgattgaccattttaaatctgtatgaatctcctttttttaacgaaggtgtttcaaaataagtcgttccatttttctttgcattggcggttttgattgttttccaggcacctttgccgttgacttgcttttggacgtatattttatacgtgcccttccctttactgttggatttaaaagtcacggctctcaaggtgtacttttttgtcgttttagtgaatttagggtgatatgtattgatcacatagttagtgaaatacccgcttttataagtatgaagccagtctttagcctctgctttttgcggagaagaaaaacccataaaaccaattccgctgattaaaagagtgaaaataatgatgagcgacttaaaaatctttttgcttttcatcgagaaaatccttccttcctgtaactatttaccctatttatgttaatgacaatatagccaatcataaatccgtccaactaaccattttgaccgcaggaagagatgtgaacagcccttaaaatgactatatgactactacttatgattcttgttatttttgattaagtgataaagttactttaaaccgctattcattttgttgtttttatatcaattgtcatagcgaggtcttttcctatcaatgcctctctttcggcgtttgttctgcggctgtatgatggggctctccttggataaactcctgcacccatgacaaactgtcatacgtttgccacctatgaatgaacgcacactacacgcaatggagggattacaatggacgaaatggtcctggaaacacaacaatggctgaatgagacgtacaaaggcagacacgggtacaacaaagtgccggaaaacggaaaaacgggctgggataccatttacggtctgacacgggcgcttcaaattgagcttggtatttcagaacctgccgataacttcggaccgacgacacaaagattgtttaagccgttgaaaaagcaggctcccgattcaaagccgacaaacatgaattacattctgcagggggcgctgtggtgtaaaggttttaaccccggcggattttcaggcgttttctatgaaaataccgaaagcgctgtaaaagagtttcaaaaagcggccgggctcactaagcaagacggcatcgtcacggcactcattatgaaagccttgctggatatgagcgcttttcggttagtagcggggggcgacaaaagaatccgccaaatccagcagaacctgaaccgggattacaatgactacatcggcttgatgccttgtgacggcttatacgcccgcgatacaaacaaggctctcatttatgctctgcaaaaagaagaaggcatgagcacaagcgtcgccaatggatttttcggaaacgggacgaccagcttatgccctaccttgactcccggcgattcacggacaggctttgttttgattgttcaatacgcgctttactgtaatggggaagcgtttgatcccggtgaattcgacggaaaatacggcgtcggagttgtatcggcagtgaaagctttccaaaagtttatgtgcctgccgcagaccggttatgcggacatgccgacgattaaagctttattatcaagctcaggcgacacaacgcgggctgcttcagcttgtgacaccgctgccattttgacagcagatacggccaaaactttgcgtgagaatggctataagatcgtgggaagatatctgaccgggaatgtgcggacaagcagcggactgacatcgaaagcgttaacgtcaaaagaactttccgcgattttcaatgccggcttaagcgtgtttccgatttatcaggacggcggctatgaatcttcttattttgtaaaagaccaaggaacgagagatgcgtacagcgctgcatcagccgcccgaagattaggttttccgtcaggaacgaccatttactttgcggtcgattttgatgcgtatgattatgaagtcacggataaaatcattccttacttccaagaaatcaagtcagcttttatgaaaatgcaggcgttctctactgcgccgaaatatgaaatcggggtatacggaccgagaaacatttgtatccggacgtcagaagcaggtctgaccaaatatagctttacggctaacatgtcgaccggattcagcggcaacctcggatacccgatgccgaaaaactgggcttttgatcaattttatgaaggcacgatcggaagcggagcgggaaaagtcgccattgacaaagacggatactccggaaaagactcgggtgcaagcagcgtccatccgccttctgatcctgtgtatgatgcaagactgcgcacactgacggatattttaacaaccattcctgctttagaaaatatatcgaatcttgcgaatgccatgtttgaattcgacaaaacagaaaccatttatgcatcacctgaaatggatattcttttatctacttcacttttggcaacagtgccaagcgaaggttctcccaacacagttaccattacaaatggcaaaccgggagcctatattaccggtctgatgggagattcacaagtctcttttacagcatcacaaattgattcctatcaaaacctgcttaacagtctgagcttgtcagtccgcaacggttatttagaagtgtatgtcaatccggctgcgggatcgctgaatattcaatttaaaatttatacacctgatattccggtcggtgacagtgctacaactggactaacaactaccattacatttaaaataaaacaaaagagcttcaggttgccggattccgaagaagtttactctccggattgggattctgtcgtgaataccatggctattgcaggcgcaggaattattgttattgtagggatcggtgctttagtcgttttagcacctgaattaggaggagctgcagccttgttcagcacggttttatcactatttctataattgaacaggcagctccttgctccaggaatgctcaatgagtattcttggagttatttctaaaggaggattcgcatgaagattgatatgcagacatacaaggaaaccgttcaaaaaatagaaaccgatttgattccgcgaagtcaaaatgacgaagaactgcttacatacttaatgaaacaagattcgctcacactgaatcaaatgaaaatgtgtctcactgaaccgcccctcaccttccaacatactgtcaaaatcgtatgtacagtcacattcatcacgttatatatcttttttttcagcactcattttaatgatttgattgaaatggctctgcagatggttttcggcctggccggccttgtttggattattgctgtatttccgttttcaagaaaaatccaagtgtctgaccgtttcagacaaaaatctgaaaacacccgtatcaccggaatgatagactttgtcctcgaacaacgatacaaagacatgatcagttaaaacccctctgcttaaggggttttttattatgcaatcccttcaccccccttatcaaaaaaggctcttctcctttggaaataaccggaacacccaatttcgttttcaatataatgaggtagtggatccgcaaagaaagaagggcgacatgatgggtatcattaatggcaaaatgttcattgaccgattaaatcagcttggaaatgagatttggcttgatggtgaaaagatcgagggacagatttctgagcatcccgcatttaagggccttctggaaacgaagcgctctctttatgatttgcaaacgaaaccggatatgaaagatcaaatgacttacagtcttcccggtaaaaaagaacgggccgggctttcatacctgcagccgaaaacgaaagaagacgtaaaaagaagaagaaacatgttcgaacattgggccagacacacgcacggaatgatgggacgaagcccggattatatgaataccgtgctgatgagcttcgcctcctccgccgcgcttttgaaagaccgcgagcattgttttccggaacatgttcaagcgctgtacgaacgcgctgctgcacaggatctttcttttacgcacacgtttatcacccctcaggtgaatcgttcacaaatgggtgtaaacgtatcgccgacacctatctcggcaaaagtcgtcgataaaaatgaaaaaggcctcatcatacacggcgcccggattttagccacacaaggcggcctgacggatgaagtgctcgtggtttctctgcctaaaatgtattttgaatcggatgaagcgttcgctttttcaatcccttccaatacaaagggagtaaaattcatctgcagggaatctttcgtactcggaaaatcatcgtttgattatccgctcagctcaagatatgaagaaatggattctatcgttgtatttgatcacgttttggtcccttgggaacgcgtatttttttataataattacgaggcggcttttgattttaatatgaaaagctcttttaacgccttcgcatttcatcaagtcatcacgagacaaattgtaaagacggagtttctcctgggcctcgcccaaacgcttgtcgaagcgatagatgtgggcgaatatcagcatattcaggctaagatggctgaaatcatcaccggtctggaaacgatgaaagcccttttggaaaagtcggagaatgatgcggaaacagatgaatggggttatatgcgtccgagtgtcactccgcttcgtgtggtcagcgcgatttttcccgacatctacccgcgcttcacggaaatcattcagctgatcggggcaagcggaatggtgactttaccgactgaaaaagcgttccgttctgacatcagaggagaccttgaccaatatttgcaggcggccgaattgaacgctgaggaccgggtaaaagtgttccgcctcgcatgggatttgaccatgagccccttcggaacaagacagacacaatatgagcggtacttcttcggtgaccccgtccgcttaaccagccatctgtacagaagctatccgaaagaagaacagaccgcggtcatcaaggaattcctgcacattcataaataaaacaaagcagagagcgcatctctgcttatgatagctggatcggctgccgccgatcctattttttattttggctgatcaccaccatcgtaatatgcgataacgcgaaagagacaagcgtatacacaacggcccacccgataaacgagaaattcaatacggtaaaggtgcatataaggcaaacggccaaagcggcagccggcataatgaacgcgtttttaaacaggtacgttccggcgactgacaagatgatgatacaaagcggcagaacaccgaacgcaaaatccaattcatcaatcaacagatgcactcccttcgcttttcttagtgcggcctaacacatcttatgcctgagtacaaaatcgagtacttcaaatctttcgcgctccggctgattttccctccggttatttattcaaaaaaatgaaaactttccttaaagcgtttacattcacgtcagactgtgataatttaagaaagcgctatcatacacaagttaatgatttttggatggagatgaggagaaccaggaaaccccgccctttcacaagggtgatttctggttctttttgtcattttcaaggaaaggagtcatacatacatcatgatagacgttcagcaaaggggaggatatgatgtttcaattgtttaagccggctccgcatattgagagattggatgattcaaagacggatgcggcctataaacggctcaggctgcaagtatttttggggattttcatcgggtatgccgggtattatttgcttcgcaaaaactttgccttcgctattccttattttcaggaacaagggttttcaaaaggggaacttggcttggtgcttgcggccgtatcaatcgcttacggcttcagtaaatttattatggggatggtgtctgaccgctgcaacccgaggtatttccttgcgacgggtctgtttttgtcaggtgtcgtaaacattttatttgtttccatgccgtgggtcacgtcaagcgtgacgattatgtttatttttatgtttattaacggatggtttcaaggaatgggctggccgccttgcggacggacgatggctcattggttttccatcagtgaacgcggcacgaaaatgtcgatatggaatgtcgcccataacataggcggaggtattctcgccccgctcgtgactctcggcatcgccatgtttgttacttggaaaagcgtgtttttctttccggcgattatcgccatcgtcatttcatttgtgattgttcttctcgtacgggacacgccgcaatcctgcgggcttccgccgattgaagaataccggaatgactatccgaagcatgcgttcaaagaccaggaaaaagagatgacgaccaaagaaattcttttcaaatacgtgctgaataataaatttctgtggtatatcgcatttgccaatgtctttgtttatttcgtacggtacggtgtcgttgactgggcgccgacttatttgacggaagcgaaagggttctctcctgaagattccagatggtcttatttcctttatgaatatgcgggaattccgggaacgattttgtgcggctggatcagcgaccggtttttcaaaagccgccgcgcgccggcaggcgtactgttcatggccggcgtatttatcgctgtattggtctactggcttaaccctgccggtcatccgctcatcgataatatcgcgctgatcagcatcggcttcttaatctatggacctgtcatgctgatcgggcttcaggccattgaccttgcgcctaaaaaagcggcgggaacggcagccggcttaaccgggtttttcggctacatcggaggctctgctttcgccaacgccatcatgggttatgtcgtagaccgctttgactggaacggcggctttatcatgcttatctcctcatgcgtgctgtccatcgtcttcttggctatgacgtggaatacgggcaagcgggcggagcatgtgtaagaaaacaacataaaagattaatatttttgcagtacagcatttacaacgattttctacgctagagacagatattgatttttaagggggaagaaaacatgcggaaacataaattgtttgctttggtattgctttcattcggtttattgtcattcatcgtcacgcctgtatcggcggcgggaaaaggaaacctcttgtctcctgacagaattttgaccattgcccatcgcggtgcttcggggtatgtcccggagcacacgatcctttcttatgaaactgcgcaaaaaatgaaggctgactatattgagctggatttacaaatgacaaaagacggcaagctgatcgtcatgcatgatgaaaaactggaccgcaccacaaacggacaaggctgggtgaaggatcatacattagccgagattcaaaagctcgacgccggctcttggttcaataaggcctatccggaaaaagcaaaaccgcaatacgccggacttcgcgttcccacacttgatgacgtgttaaaacggttcggcagacatgcaaactattatattgaaacaaaggcgcccgaaacatatccgggtatggaagaaaaactgatcgcttcactgaaaaaatacaaattggcaggtaagcatgcgaaacttggacaagttatcattcagtctttcagcagggacagccttctgaaaatcaaacagctcgatccgaaacttcccgccgtccaattgcttgaagcggaacagatgacgtcaatgactgacgcagatttaacggacattaaaacatatgccgtcggaatcggaccggattacaaagcgctgaacgctcaaaatgtccgaaacattcgcagccacggccttctgcttcacccttacaccgtaaacagcgaggcggacatgcgccgtctgctgaattggggcgtaaccggtgtgtttaccaactatgcggatatatttaattttgttaaatctaatagggatcaataggtttacgaatctaaagatttcaaaacaaaaactgcacgtatatcgcgtgcagttttataatattaattttaaatatttctccctttaaataacggtcttagtatattcttaacttttgctttaatagatttgcccttataaataacaggaacactttgttgcaaatgaccaataatcacttctgcattcttttttagcttaatttgttttaactcctgcttagttacttcaaaactaaaatcatatgacattttttttcgagtagaatctttaagtaccacatcaggtttaaacataagaaaccttccaaaattaacctggaaagaattctgttctccaaaacttaaatctgtttcacaatcaaaatgtcctttaatcctaggaccgctgcaggttaacacaaagtttttaaaatgtaacatttgatgtttaacaacaagagaaagattaccccatttagttagatacgagtttataacgataggttctttacatccttttgcaatataagaagcattttttaaataaacgctttctttcgattttaatctcaatgatttcgtataatcttctatcttactaattaatcttaaatctaatataccatcttcgctatttaagtggagcaaagattctataggtatatacgcgtgaaaataagtgattttttcttttgttataatttgcgtatctatttcaaaaggatattttttttcaaaaaggcttctataagctggaaatgaaattgttttatctttttgttctctcaaagagacttcgataaataaacgctcatttgaggagtcaacatgtgaatgataacaaaaaccctctaacaaaacggcattctctaatttctctatttttgttatttctccttcaaatttattattacgatgaaaggaaatagactcatgcaaggccaaattgtatgctaattctggttttggatagacctttccatgttgtactaccatgttaccaggttgtttttcagcgtaccagaaagaaattaaatcctccaattgtcctttctcaattaaacgtaataagagtttatggcgggaagaaaactgctggtagtaatctaagtattgatacttgtcaagcattttctttaatttattaaaaataaagattttatcttcaattagaaaagactttgaaatcagtgcgcttaactccacttccataatcctttcccagtaatgaaagaaaatcagccgttttttatctatttcaaggttcagtaattcaatagatgccaatgtttcttcgattctgaacataaaactttcacctgataatggtttcttagtaagttgaacccttcctattgtttgatgattggtcaaataataacatgggtaatctttaacaagggctatggaatttgaatatgcatacgcttgaatcataaacggttgatcttctcctagagagaagtgttccggaaaacgaatattatgtttaattaataactcccgtttaaatagtttttgagcactcatcgtaaaaagagcattggaaccagggaaggaaaaacaatctggattctttttaaatacagccacaggaacacctctattaattccttcataacggccgataattatatcactttgatactgaactattttttcttccatcttttctaaagcttcaggtcctaaataatcatctccgtctagaaaataaatataatcacctgttgctgcttctatagctttgttcctcggtctgccaggtgcgccgctattctgctgatgaattactttaataaacttgtacttgctcatgtattcatctaaaatattaccgcttttatcagttgaaccatcatttacacagataatttcaagtttgtcctctccaactgtttggttcaccacgctatcaagacaatctctaattgtgttttgatcattataaaccggaatagctacagtaaatatcatcttttttctccttaattattttttcctatataaaaacaagtccagaattattcgattccaattttaaaagtttaccataatttctttcttttataaatatggttaaaaattttaatgtgtttttaaacctagccaccgtaatctagataataagatggaatatttccagtaattaaatcggattccataaggcccctaacaaatgttcaaaataaaaatacattagtacaggctttgattcattttctctttgaatttggaaagctcacttcatttaatcctaattacgatactttgcggatttttaatttcacccatgaaaaaacacctctaagtcgttttcaggtattatacctgcttttcaacttaaaggtgcctttgtcctgcgcttacaggctcagactctcaaaaacttcaactttttataacttattcttttccggcagcggcttcagcctgtccgccttttaattgatcgttaattgctttggcgtctttcaaatactcagtcttgaagccgctcttcagcgcccacgcatagaaggcaagggcaacgattgcgatcagccccatatcccatccgtacggaatgatgttcagaccgccgaatttttcacttccgagccatgaaatgaccatcatgctgagcagatagacaaccatccagacgccgcctttaaagtttctgcggaatcctttccacttcgctttcgcttggtagtagaaatatatcggaaggccgatcaaaatgataaacagcacctgccctgttaacggccagcgcgcccaatacagcacgagagacgcgaacacgaagccgagcggtgcaaccacgctgaggcctttcagacggagaggccggtacaaatccgccgccgtccgccgcagcgtcatcaccgtcacgggacccgtgatataagaaatcagcgtcgcaacggaaatgatttcagcaagcacgccccatcctctgaataaaaacagaaagataaacgatatgatcaggttgaaaatcatcgcttggcgcggcacgccgtacagcggatgaagctttccgaaaatgctcggcatatatttatttttttccatgccgtaaatcatgcgggacgtcgtagcggtataagtgatacccgttcctgacggagatacgaacgcatccgcataaagaataatgacaagccagttgatattcaatgcgatcgccaaatcggcaaatggagagttgaagttcaggtgactccagccgtgaacaatcatggaaggttcaaccgcaccgataaatgcgatttgcaataggacgtaaatgacggttgcgaccaacagcgaaccgacaaccgcaatcggaatcgatttgccgggattttttgcttctccggccatgttaatcgggctttgaaacccgttaaacgcaaatacgatacctgatgtggccaccgccgtcagcacgctcgcccagccgttcggcgcaatgcttgaaccggatgtgaagtttccgccgtgaaaaccggtaaacagcagcgctccgattgtcagccccggaataataattttaaagatggtaatcaatgaattcgcttttgaaaataagttaactgtccaataattcagtaaaaagtaaataatcagtaatacagatgcgaagccgagcccctctcccgtaagagtgccgttgtgaacgagattacttgtccattttgcccattcccacggccatgagctcatgtattgaacagacgcaaccgcttccaccggaataacggaaacaatcgcaatccagtttgcccatcctgcgataaatccaataaatgatccatgagaatattgagtatattttaccattcccccggcttccgggaacattgaacccaattcactgtaagaaagtgcgataaacaaaataacgatcataccgataatccaggaaataattgcggcaggtcccgcaatctgagccgcccgccacgccccgaataaccagccggagccaatcatcgacccaagtccgaccatcatgagtgcaaacgttcccattctgcgatgtaattgattcataaagttaacacctttcaattaaaatatgactccagcgctatcatatatttataatattattctgaaaatagttttgtcaatctttatcgcattaaagcggcaagccaaaattaaccttccgatgtttaaacagccgttaagcgggaataactactgcaagccagaaatagaaaggagtttttatcgtgaaacaaaaactgctcatttcaggacttgccgtgtcgactgtcggagtgacttcctacctgctcaaagataaatcaaaccgccaaaaggtgatgaactttatccgcaatatgaaaacatcgctctccgggaagcaggatattgaatcattccccgtcaacaaagcaggcaacccgcatcccgaagatattgaagataacaaaatggtatccgaaggctccatgtacccggttcaatattatgatgacaagaagaaataatctgttcccgggctgcccggccgtatcaaacggcggcagcttttttatgcagacggcgtttgatagaaccgccaatattggcgcgagcctttatcccgcacggtaatgcccagtttggatatttccgctttcagttctttcgcatcagccttttcctcctctttcagcgccttttctctcgcttttaaaagagcatttgcccctggctccaaatccggcgtgtccggcacccaccgtttgtattcttctttaaaaggatcttccgtccccagccagacatacccatgcgcgcgaaacgcatcagccgctttttcaaccgccggctcaagcttctcccgaaaaagctcctgcccttcagtccccaataagacaagatgcttttcatccgtaaacacaccggaaatgctgtctttcgaaaacacgctttcttcattatatatggttaaggacacctcgctgtccgtcacgactgccacaagagtttctttaaaagctgcccgcgtcagccacactcccccgattaagccgataacggcagttgcagccgcagccttccatccgtgaaaagaagcgattatttccagcggcccgtgaaaaggcagccaatccaatgttacggcccacttcgcaatgaccggcagaaaccatccgatgaccagcccaaataatggcggcaccagaaaaaccaaagctttttcaaccgatgacaactcaagaaccgtctgtttttttatttcgttcatgtttctcctccgtctgtgtttttcacaactatccattatacaaagggttggatgattctgtaaactgtttccgaaacaataaaaagcctcccgaccgccgggaggctttttaaaacaggagctcatatacttcattcaattccatcgtgcgcttctcatcctgctcgttctcagcatatttgatttccttttcaagcagttgattcagcgcatccatttccaaatcatttagatctttcacaaactcgccctcatttgcataatgcttcacctgaagctttttataaatccctcggcacacatcatgctccaagtggttcgaaagcgactcgcgcaaatatccgagtgtcctgtccatcatgtaagccctcccttttctttaggaatagcttcccggaaagagagaaaaactatacatgaaagcaccgggcggctgttttaactctgtacctgaatggagaaaaatccgctgcttaacggcgtgtacggcccgttcagccccgttgcggagaaagagaacgttcctgaactgacataagaaagaggaacgctgtaatatttaatatagcctgtaacgatattgccgttttttgtatattcatcttccagcgcttttgacgtaagatttgtaatattcgttccgttgttaaatgcctggatcgagttattgttcggatacccttggaaatatacggctaaataacccgttgtccccttcatcggttttgatgcgctgatttggttcggcccgatattttcccattggtaattctgaccgtcagacgtcacaccgataatacggatttgtgttaaagcaggagccggcgccgcagacgctgacggagcccacaacccgctcacaagcaacaaagcagcggcggccgcggcaaatagcataacgagtctctttttcatgtttcttcctccctgatggttcaaatttataattatgttaaatattataagttttattttatcagagaaatcaatagatagacagaatcaatcagtcaaattggtgaactttttatataaaaaagctatctcctaaaggagatagcttatataacattatttctttccacactccaaaattgtgtatttactcggggtctgaattacatttaatagtgttaatccggctttctcaatcaattgttcaaactcggttttctttctgactctgccgcctgcagagcatactaaaaataataaatcacgaaaagcttcttcaggggacagcttgtctgcttcaggcacattttcaactataatcagcttggaatgatcagacatggcaccggctatattttcaagaatagcaaccacatgctcatcatcccaatcatttaacactttgcttatcacatacaagtctcccccggaaggaatttcctcaaacatactcccttccgtaaactgacagcgttcgctcatctctgaagatgctaaatgcttttttgcactttgtatcgtttttggaagatcaaacaatatcccctttgatttaggagcagcacctaaaatgcctgttattaactggcccattcctcccgcgacgtctacgataacatcaaacttttcaaatgagtaagctttcaatatggatggcagactcatttttgaataaatctccatcgccttatccattgtttttaagtaatcttgatcaagactattattctcataccatttatcgccataaatggcttcaaaagcggatttgccggttttgatactataatccattttaaacatagactgcactactgtttcatgcagcagatattctaccaaaggctcaatggattttgctttcccaggcatcaaagtggcaccatactctgttacatcataatagccattttgagcttgggcgaccaaaccgacggattccagcgctcttaagagcctgaataaggcagaggggttcaattcaagggcttcagctatcgtttccgctgaagctggtccattttgaaaagcggaaaatacatctaattctaccgctgttttaactgccagggaaaaccccagccctgaaaccatttgcatgactgcggcctgaggatgtttcttcggtacttgtttatcttgctgaactgaattggtcatttacgttaacctccgattaattaaatggtttctgctgcttttttgatataatgcatatactgattgagcagattttctacagtactcttatggtactgattttgattatattcaattccaatgcttaattttttctctcttaccaacacaataaacttaaacttgtaattccaaatttcatcttcacttatatcattcccggttgaaagcggagagaccgtaaagctttctgtgtgcagttcattatcaaattcgcccatataattaaatgaaatgtctggttttgatttctcttttataccttgttttaaatatcttaaaataccatatcctatcccttgatcaggaatattggctaaggtcgagttaacattatctaaactcgaaccgatatgatctgaatcggagacctccaaagccactggatagattgcagaaaatctgcctactgttctgtagatattaagcttctcactctgatgagtgcggccatggttgcctaagtgcacgagagatgtattactgcctgtttgatgttttattgtcaaacctaaagctgtgagcaaaacagtctcaatagtgaaatgatcttgtccttgaatcgcattcattatattttcagtttcccgaacattaaactgcctgtatacttgtctgttatctttgactttggcaatttgcccctgaatatcaaccggaatagacggagcataaacattttcgatttttgtccaatactctttctcaaacaacagccgttcactttcagcatatttatagagataatcagaccattttaaatacgaatcggttttatttggtaatacaatgtcttcgttacttttaacttgctgatatgctgtattaaaatcttcaagcagtattctccaagacatatgatcaattatcatttggtgaatgacgattaacagatgttccccatctgcttccttaatcagtgccaatttaacaagcggtccgtgagtcagatccatactggcttgtatttgatttattttcatttttaaatctgattgcggcatgtttattgcattaatcagatgaaagtcaaacaagtcgccgtccgtcaggcctctgattacctgtaccattctatcgcctttacgtttgaatactgttctcagactgtcatgatgctgaataatccgggtgaaaatgtcttttacaatgtcttcgccaaacccggcttccctgtatagcataaaagaaagattccgatggtgcagagtatcattatggcgttcagccagccagcattgaattggcacaagaccggcttcccccgttatcacactgttatcagatgccgttgttatataactgactttattcgaaactccttcgattgtctggtaatgaaaaatgtctttcacttccagcctaagattgaatttttccattctgaccgctgcttgtatggctttaattgagtctccgcctaaaacgaaaaaattatcttttatactgattttagaaacttcaagaatgtcggaccagacctcactgacgattcgttcaatctcgtttctcggagcaataaagtgatgcagctcggcattattttcagctggtagcggcaaacgttttacatcagtcttcccattgttcgtcaacggaattttatctatgcccataatgactgtcgggaccatatattccggcagatattccaataagtattcttttagctgagaaggcggctgcgtatctttacatactgtataggcatatatctgatcattgtgagcaatcgcaaccgcttcttgaacattttggtgagacagcagtctgtttacaatctcatccagttcaattctaaatcctctgatttttacttgacgatcgattcttccggcaaattctatattcccatcctcattccacttgcctaaatctccggttttatacattttctcaccagaatgaacaagatccgggataaacttagcctcggttagttcttcacgattgcaataaccccgtccaactccttcccctccgatgtataactctccgataactcccggcggcacaggcttctgctgtttatctagtatgtagatagaacagttttttatcggcgtgccgatagggatcctctttatattggaaatattatctgggtttatcgtataagatgcagcatcaacacagcattccgtcggtccatatacatttgttatataaggacggtcattcttcttaaatactttataaaaacgctttacttcttcaggtttaagcacttcgccgcctataataaaatgttttacacctatacggccacactgcggagactcagagagcaggctgagataggctggtgttccatcagaaatatttattttattttggatatagaactcagcaagtttcgtgatatcatgcctggcttcttcagagatgatgtaaagagagtgtcccaaaagcagcgcagaaaaaatctgtttgacagaagcgtcaaaggaaaagggtgccaacaacgctacattctgccgcccgccatgtttgccgtagatacgttcatgcagggcttctgttaaattcactatacttttatgttcgatcatcacaccttttgggtgtcccgttgatccagaagtgtagatgatataggcaaggctgtgccgttccgctcctcctttaacatttctcccgtcgtctggaactgtttccaattcattcagacaaacactttctactccgtacctttgacaatgattgttacgatccgtcagtaacaagcgggccccgctgtctttgagcatatactcaactctttcttgcggatatgatggatcaattggcagataagctgctcccgcttttaaaattcccattactccgatgataaaatcagtggttcggtctgcagctatgcccactgcttcattctttttgatacctttttgaatgagtgctcttccaagccggtttgcatttttgttcagctcactataagttaagcttccgtcttgtgcagacacagctatttgattcggcgttgcttccgcctgcttctcaaaaagctcacagatagatgcatctgcgcctctgcttctcagtgatcttccactgccactgtaactcaacatctcgcgtcgttcattttcttctaaaatgttaatctccccgattagtccatcttgactttcaacaatatgattgagaatcattaagaatcgatgtgagaatttttctacagttgtgcgcttaaacaagtttgatgaataagtgaactcaaacttgatatcctcttctgaaggaaatgcttgaagcaaaagatcaaatttggctgttttgttttcgtaaggatacggcttatatttcagcccatttacttcaattgccggattatccatcagctgaaggacaaacataacgttgaaaagagcattctggtttatatccctctcaaggttcaaatggtctacaagctcttcaaaaggataatcttgattttcataagccagaagcgcattatccctaacggcttcaagcagttctttgaatgttttgtcggcagatggtttatttctcagtgccagcgtatttacaaacattcctatcatgttttctaattctttatgctttcttccggctacaggtgtgccgataataatatcttcttgaccagtaagtttatggagaagcacattaaatgaagccattaaagtcatgaaaagggtgactttttgttttgcgtttaattcttttaacttggcggtcagctctcttcctgcataaaaatagattcgttcaccttgatcatctcgttcggcttctcttgaaaaatctgcgggcagattgagagcgggaatttctcctttaaactcatttaaccaaaaatctttttgttttttcatttcttcagtatgaaataattcattttgccatttcgcaaaatctttaaattgaatgttcaatggcggcagttcgttgccttcgtataaatttatcaattccctttggaggatcgggatagacgccccatccgctataatatgctgtaaatctatcattaaaagatgtttttgatgactaatctcggctaatcctgcacgcagtaaaggagccttttctacatcaaacgggcggacaaaattagccataaggctctctaattcttcgtcggaggtcttgattctatccattttaaatcgaacgtctttttctatgttttgcacaagctgcccgtctcttaaaactatggacgttcttaaaacctcatgcctgattattaattttttaaacgcatcttctaaacgtttatcgtccaactctccttcaatcattaaaaagaacgggatattataagaagtgctgtttttatttaattgatctagaataaaaattcttttctgtgcagatgatgcctcataccactcaaaatcgcctgctttgggaatcacattcacatcatttgtcttcctcagagaatattcatccaaataagctgaaaagagttttatattcgaatgctttagcaagtctgaaactgaaagctccgttccttgctgtttattgataaagttgatgatttctattgctatgattgaatctccgcccatttcataaaaatcggatgtaacatcgatcggattgattccaagggcatttccccaaatttgtcctgccattagctctgtttctgaataacagccgtcttccctgccactcagtcttattatttgaggcttgttgactgaggggttatctagtgcattgcttatcggtaatttttcaggcagtttcacccaatgtctctcccgcaaaaatgcgtaacccggcaagctgatttttcttcttttttctccttcatatatcatttcccaatcgatctctgcacctttttcatagagcttgcttatatcaatcagaagactctcatctgttctcccggctgcattataagccttaagtttttttccagcagcggtacttagatctctatcggtcttaaaagaaaatgcagcttcttcttgctgaaccggcgcttcgagcagactttcaagttttcccttcagatcttcgatgtcttttacgagaaaacacactctattctccaggtgttttcttcccgtattcgctgtataacaaagatcagagagatttaaattgttttcttccgagataaaatgaagatactttgatgcaatatcattcaggacggacttattttttgcagacagagtgaatacctcttttacctgtctctgttcagtctcacctattattccaggtgcttcttccaatacaatatgacagttggttccgttgaagccaaacgaacttacaccggctcttcttggcgtctctcctttttcccaatttcttatcatgtcattcacataaacaggtgaattcgaaaaattaattaaaggattcggttcattaaagttgatacttggggggatgaccttctcttttaaagccatgcatgctttaatgagagacgccatgcctgatgccccgactgtatggccgatattgggtttgactgaacctataccgcaaaactgctttttatcggtatatttcttaaacgcattcgttatccctttgatctcaatcgggtctcccaaaatcgtgcctgttccatgcgtttcaatataagaaatagtttccggactaatattcgcattcttccaggcacgcgtaatcaatttctcttgtgattcagcattaggagcggtgattccgttagaagccccgtcattattcgtagcgctccctttaatgacagcatatatgtggtctctgtcttctattgctctatgtaaaggttttaatacaatagcagaaatcccctcaccccatgctgtcccctttgcatttttatcaaaaatgctgattttagcgttttccgcttctatctcgctcatcgtacctatattttcaggtcttagaaataaattaacgcctcccgctatagccatgctgcattcttcatttttaagtgcctcacaagcaagatgaaccgaaacgagtccggaagagcaggctgtatcaacaaccaggcttggccctttcagattaaaaatgtaggaggtcctgcttgccaatatgccgggataagtacctgtcattgcaatcatatccgcatcatttactagggaagcataggaaaacttcaagtcaccgctatgatcatgtccaacgaaaatacctgtattcgaaccttgtaacttgttcccagcataaccggagtcttcaatagcgtgataaactgtctccaaaaacaatctttgtttcggatccataagcatggcttctcttggcgaaattctgaaaaatgatgaatcaaacttatcaatttcatctaagaaacccgctttaaaataagaattctcattcgcactgggcagcaatggatcaatatctttccgccgcttcttcggtaagtcccggatgcatgaggcacggttcataatgttttgccagtattcttttgcattattggcttttgagaaacggcaggatatgccgataatggcaatatcacattgatttttcttggacttatctgataatcctttcaaaatgcgcaaagccatttccctgtccattttttgctcttttacttgctccaatacatattgttttataatcgaaatatcatccacgattaatcacccctatcgattttgattctatataaaatatgagaagcatcatggatatatagaatagctgcttcaattgaagaagcagcttattgaattagttaatttttgtctcaaacacctttccatcttctttacataacacctgcactagatttcttgcctgtaagacaacactcggaagacctcctcccacttgactccaatgcccaaccatataaaagtctttaagtccgggaagtgaacgtttcagttttttctcgtgtatgatgccttccatctgtttttcccagccctgccagcttccatttctattatttgtgtatcttctgatcgtatatggggtggatacatcagtcacgtcaatatttgatttaatttcaccaaaccatttgtctaattcatcaatcattacattcgcaattgcttttttctcttcttcatatttttcgcggttgtttttttgcaaagtctcccagtattcagcagaagttttcgcatacacgataatactcgttttgccatcaggtgcgaaggaaggattttcgttatatattttcacaaatatgtttttaacgttgtcacagccatagctattaagaggctgttctaattccaggctcaaataatgaggatatttttcaaacgtttttgatacgcccaatccgacataaatttgcggtgcacttgttttaaggttgtcataacaaaatgtcagttcatcatctgtatattttccatccagcatttcaaaaatagttttatagccatccgctgctgaaatgacgatatctccataatgacactgcccgtttttcaactctattccgatcgctttatcattttctactaaaaccttagaaacaggtgatttatattgaatctcaccgcctaattcaacatatctagcttcaataatttttgcgaattgcagagaaccttctacaggatgtcctgaagatttgctattagcccagcctaaagtagccataaaataagatataggggtatctacattaaaccaaaacagacgatttacattctctcttacaaaactgcttttaaagcgctgggcgaattctttgatcgtcacttttccccattgccccattactttcatgtaagggccagcctttgctttgaaggcctcaaagtctgctaaatcgaacagttcgggcgctttatccaaatccagctctacatcagaaacaactcgaatgccatcagttaaaagcttaattgtttccgcatcttcaggtgcaactcttaaaaactcctgttctaatttatctacatctgcatacagcgtaaatgtatcaccatttctaaagttaacaaccgcaaattcttcatcattaatgaattccatattttgtattacgttcagttctttccaaaatttatggaacgtattgttaggtcctgaaccgaccagccagctgatacaaccgtcaaaaaagtacccttttctcttccagccggtacataaaccacccggcagcaaacccatttcaaagattttcgtgctgtatccgttcatttgcaagtaacagcccgcggccattcctgcaataccgcctccgattatgattgcagtcttgttttcttccgtattcttcattatttttccccttttccgtaactagttttctagaattttcaatccttcttgtatattgattttgccgttctccaggtcgtcaaatagattgttgagttcttgctcaagccgattttcagcagtatcttcttccgtttcttgctgtgaatctttattcagctgcttgtcaatatactctgatagctccactacagaggaatatgtaaatatatcggatatatccacgatgtcaggatattgttcattaatcagttttaacagttgggttgccataatagaatcgccgcccatggcgctaaagctttcatataaatctagctcttgcatatccaaaaccatagagtacatttgcgcaatacttttttcggtatcggagtaaagttctccctttcctttcagcactatatcttcagtatctgttcttcgacgtttttctgcttcgttttttgtcctgtttttatctattaatttgtttttgatttgctcagataattcaaaagacaattcatccttcgcaaaagcgaggagcttcatatttaatgtacctggaatgatattagtaagcttattcgatgctatttcttctaaaacggaaatagccctttctaccgtcaataatctgaaaatagagctctcatcagtaattccataatcgacagctatgccgacctcatcccaagccggccagttaattgacagcgtgttttttccctgtttgttttgcatataagcaaaggaatctaaataagcatttgcagctgtataatctccctgtccggcacctccgaaaatagaattaattgaggagaacaaaatcgtgaaatctaaatctacgtctctcgttaaatgattgataacccatgttccattaattttaggagcaagcacttctttaaaaatatcagcttcttttctaaagaggaaaccgtccccggcaactccggcacaatggaacacgccattgatcgtaccgtatttctgttttatttcttcaattaccggccccatgctgtttaagtcagaaacttcacagctgtagcaatcaactttagaacccattgactcgatagctctgatggacttcagttttctgcaaagctttaaatccgttccatcagcaatgatgtcgtcccatcggctttgatcaggcagtttagagcgattgagcaatacagcattgacgttatgttttccagccaggtgctttgcgatctccaaaccgattccgccggtgccgccggtaatcatatagacaccgttttctttaatttccaaaccgccgtgtttcttattctttattggttcaaccgtatccaaccgactgatataccgcttaccatccctaaaggcgacttgatagtgtttcccttttgttcttaactcctcactaataatttccggtgaagtatgttcatcaatatcaattgctttacatgaaacattttggaactcctgcgaaataacacgtcccagaccaaacaacgcggcgcccaatggattgattgtattttcttctccggacacttctgtcacaagatcagaaataagatgcaaattaatattgcttttcatcttattcttacttaacccccggactaagcggaacaggctgtatacgcctttattctgcatgtcttctaaatctgttaatgattccgttccttggcggctgatagaagacatatgtataatgctgctgatattttgatcgtttatgctatgcaataattgaacatagtcttcttctgatccgctaattagaaatttccgcccatttatcttctgaaactcatccccaaactccacttcaataacatcatcgtcacgaattttcaactgttccagtatagatttataaatttccatgttgtctttaaataacagtacaggacctgttacctctgttttttcttcttcaaaagcttcttgcgccatccattttaattgataaagtgattcagaactttcttcaaaaagggcattaatccgatttactttttttaatacataatcggtgatttctgcaaaaacatgtccttctgtatctattaactgaatatcacacagctttgtctctttgctgcttgcgttctttttgacaaacgcataaaaatgctgcggcattcttgagtaaatcttcacacttttatatgaaaaaggaaggaatgtactatcgtcatcatcttctccaataaacacgttcaccgcattatctagcaaagcgggatgtaaaaagacgtcttttaaatctgttgtaaattcatcagccaattttaattcggccaattgttcatcagggcccagtatgacttctttgaagttcagccacctcggtccgaaagtaaagactttgctgattaaaccatttttattttcataattgacttttatcttctctctgttactgtcattcctaacagagtctaaatcaaacattgatacagagtccgttaatggaaacgcttttccttctgcatgtgtaatccaggtttctccttcctgactggctattataaattgaatacattctttctttttcttaatgattgtgtgtacaatcttactctcaccctcatttaccgttaacggagtgaagaagataatatctcgtaattctaattgattgcttttatagtaagtggcacttgctcttcttcccatttcgatataagtcgttcccggaataacacaagcccccatgattttatggtcacttaaaacccaatccttattcacattaaatgtcgttgaataaatcgtctcattcattgaatcagccaaacactggtcaatcagcgggtgactgatatttttctgatgcggcgcttcacctcttctgtcctttacttctccccagcataatgttctttcaaattggtatgtcggaagactgacaatctttctgtgctcatccttgtacatttttgtccattctacttttgctcctctgatatacaggttgcaaatttccgtaaggtttagcagtaaatattcatccccttcagtaagaatgtcatgtatcaaattgtcagattgagcattcatttttcgatgttcagataaggaaatttctccttcatccataatctgttttctatcagaaccaactttatggaaagaaaaatatacgcctttttctgatatttcattcaggttttgtcctgcaagcctgccgatttttctctttaattcttcgtaactttttacaatcagagccaatcggtagccgtaatggccccgtcctgtgtttgccgtatagcaaatgtgttttacgtttttttgagttccttttttaaagaattcattatattccttgatgagtttcattaaagaattctctgttttagctgataaagtaaatatctcaaatgtttcatttgcaggaatgacctcttcaacctcatctccagcatcttcaatcactacatgtgaattggtccccacaaagccgaaagaactgattcccgctctcctcggtgagttatttttaggccattcatgggctttgtctgtaacaaatacaggtgacttcacaaagttaatcaatgaattcggttctttaaaattaatactcggagggatgacttgatgcttcatagacagaacgatcttgataagtgacgccaaacccgaaacggcaacagtatggccaatattagatttaacagatccgatcccgcaaaactgcaacttgtccgtatattttgaaaacgcattggaaatcccctttatttcaattggatctccaagctttgtgcctgtaccgtgcgcttcgatatattgaatggtttcgggatcaatttgagcattttcccatgcctgaaccagtacttcttcctgggcgatggcatttggagctgtcaatccgtttgaggccccgtcattattaactgcactccctttgataacagcataaatatgatctccgtcctgcttggctttacttaaaggttttaagatgactgccgctactccgtcactgaaaaatgtcccgtctgcgtctttatcaaatgagtgtactttatcacttactgattccatcattgattttttggacgttttgaagcgcggaaagaatcctaatgaaattccgctgacaatagacatatcgcattctttatttttcaaagcattacaggcaagatgcacaccaagcagccccgagctgcaagcagaatccaaaaccatagaacttccttttaaatttaataaataattaatccgccccgccatcaaacccggccagttgcccgtcatacttgtcgattctgattctgtaatgtagcggtacaacgtattattgacatggtcttttccaacaaagagcgatgtgttgcttccataaattttgtcccctgcataccctgcatcttcaatcgcagtccataccgtctccagcaatactctatgagacgggtcaatggcctttgcttctttaggagaaatattaaaaaattcaggatcgaacttgtctacatcttctaaatatccgccaggtttccagttatctgcttgttcttccgtcagatatcctgaaccgagaaaatcagtaaaccctttattgtttacgatcggcttaatgtaattgatcatatcttttggatattccgccttgcagtcttctccattcatcagattctgccagtattcatctgtattgtttgctttcggcagtctgcaggaaattccaatgatagcaatatcttcattgctgcttgcagcctttaattcttttagcattcgctttgcttctttctggcttagcttatgctgtttcacttgttcaaatatataagattgaacgctattcattacggatcactcccgctttctttctaagaaaatttttgataggaagggtaataagatctacaattttaccttaaaatggaattcagttcccataataatgtgataggcaggctgctttttcttcattcaattcgcagcctgccaatattccatttgcgaatatatttttacaggcccaattcagttattttcggtctggatgaaatatttgatttgcttcgctgacttccatctctccggatgccagcttattcaaaattgcatccaggtcatcttcattgtcttcttcaggaattcggtcagaagacttctgatcactgaagtgggattcaaggtaggttgacatctccttaatggagggatacgtaaaaatatcagaaacatcaatgagagaaggccattctttctctatttcttttaccagatatatcgcggatattgaatctccgcccaaatcataaaatttatcagttatactgatttgttctaagcctaaaacttttatccaagctttcattagtttattttcaatatcgctgaagcaaaatgtctgatcagttttcgactcaacagatttttttacaatcgcctgctccttaaaagtcaaaatatccggggataatcggaactgaatttgatcttgatttaattccagtacccgatgatcaatttccccgatgatcacattccggatgtccttttgcatgacttcatcgaaggcacgtatcgcttcagctgaggtaatcgtcttaaagccgttttcatctttatgttcgtttccggccttttgacgctcttcaatatattcggcaagcatacccacatcagaccagccgcaccaattaatcgtaactgttttttcatccggtcttcttcgctgtctgcgttctgcgaaggaatccaggtaggcattagccgcagtataatcagcctgccccatactccccgcaagtgctgtgatagaagaaaacattatgaagaaatccagatgctcatgctttgtcagctcgtttaatatccatgttccattaactttcggtctgagcacgttatcaaacacttttttttcctttctgaaaataaacccatctccagaaacaccagcactatgtatgacaccgtggattgtattgtatttactctttatttcctcgaatacatgaatcatttcactttcatttgcgacatcggccttatagtaatctaccttagaaccgctttcttttatttcttttagagcatcgattttctttttgtttcccttctccatgttgatctgctgctcggagcgtccaatgaggattaattggacattttcttttgatgataaatacttggccatttctaatcccagtccgcccataccgccggtaataacatatacaccgttctttctgatgcttattttcccttcccgaattacggataagtcttcagtctggagctcttgaacgtatttatgccgatctctgtaagcgacaagctctgactgttttgttgagttgatttcaaacatgatgttttccgccataagattttgatccaaatctatgcatctgacacttacacgcgaatattccttttcaattacttttccaaaaccgaaaaatgccgcgttatgcgggttaatgtctggttcttcaccgcttacttgatgtgcaaggtctgcaaacagcatcagttctatgttattttttgtattttctacaagtgattttgttaaataaaataaactgtctacccctgaggatatttttttctgaagctgatatatgtttttgtctttctcatcgctgatagacatcaaatggacaatctgagaaaccttttcactttgaagagtttttacaagacagtcataatcttcttgagaatcactgactgtataatgatggcttccgattttagagaaatagtcaccctgttccgcgacaatcacagttttcccttccagttctaagcttcgaatgatttcctcggataaactgcagccattattcttaaataataaaataggatgatgaatttctcgcatctcgtgtgattgatcgctttctcttatccaagatagcttatgatatatattgtttcttttagtcttttcagctgctttatgcaccctttttacgatgtaattgtttatttcaccgaatacttctccagtctcattcagcaggacgatgcgaaacgttcctgtttctccgttgcttcggctctttttcttgatataactgtaaaactttttagaagcggagccataaatcttaaattctttataaaaataagggagataggtttcgttatctatcgtgaatgtcccggcattaacggcacaatccatcatcgcaggatgaagcgaaaactgaacgaaatcactctcatattctttcggcaattccaattcacatagaagcctgtcgtcgtctctgtagattgcattggtgcatttccatctgcctccgacttgaacgatgctttccggtctattggtatcttctatatgataaaccgacttgtattcatcggtgtttatttctgtcaatggatgattattacgttgaatggcatagacagcattgaagcttttctttaaatcctcaatgtcatatgtttcccgtaccggttcttctttcgcaatgaccgcttccgcgtgctttatccatttatcgccggacttacttatcacactaaactctaaaacgctgtcctttttctttatgatcgtatgaacttctttaacttcatttgcttttacctttaactgatttgaaaacgtaacgtcttttaacagaatgccgacaggttcgccaaagtattttcttcccgcttctctagctgtttctatataaaccgttccagggataacgtaagaatcattcactttatgttcatttaaaaaccaataatcagtgacattcaaatgggatatatacacttccagattcagtgactgcactgcaagattgctcaataaagattgttttttctcatcggctgaagggccgtctgcagccggctcagcccataatctttttccgctgaatttgtatgtcggcaagctgaccttttgaaaattcatctcgctataaagatcttcaaagttgatattcgccccatcacaatacatttcacataaaatatgtgagtcagaggttgaaatattagagacgttttgtctgactctttgaatcacattttttattgtttgagtattctgcacactgtctgtatgcgtttttcctataaactttgtttgatttgttatcgattgaaagtatatatttttctcccgatacgttttccattcagagcatgataaaaactccagcttttccagcagttccgcgacagagcttattaccatagcgattctgtatttgtttggcaatctcccagtgtttgctgtataacatatatctcccagattcacatctgtttctctctttaaataatcaatatgatctgtaagcaagtgcgcgagtgatgttttagtcctagctgaaacagtaaaaatatgttcagataaaacggattgatcgactttttcaactgcgggtgcctcttctaaaatgacatgacagtttgtaccgctcagcccaaaactgctgatgccgcacctgtatactccgctgctctcccatgctgaaacggagtcattgacgtaaacaggcgattcatgaaaattgatatttcggttcggcactttaaaatgtaaacttggcggaatttttttatgctttaatgccattaccgctttaattaaacccgctattcccgccaaactatcaagatgcccgatgtttgttttgactgaagatacggcacagaactgttttcggtctgtatattttctgaaagcccgttgcaacgcatttatttcaatcggatcccctaatttggtccctgtcccatgagcttcaatatatgtaattgttttaggatctatttttgcatttttccacgcatctactattacttgttcttgagctgctgcgttaggagcggtaattcctactgagctgccgtcctggttaacagcgctccccttaatgactgcatagatctggtcatgatcacgaatcgcttgggccagcggcttcagcaatacggcagcgactccttcgccgctattcgtgccgtcagctgaatcatcgaaagtccttacagcaaaatcagatgaagaattcccgatatttaacctgctctcctctattgtcttggggaatacttttatgttcactccgccggctaatgccatatcgcaatccttatttcttattgcctgacaagccgtatggagggcgacaagcgatgaagagcatgcagtatcgattaccattgctggccctttaaaatccaagatatatgacagtctgcttgcgataactgatttaatgttacccgcggtagccagtccgagtaacgattgatctcctttttcaagcaatctgaagtattcatttgagccgtcactgctgagtccaatgtatactcccgtatttgtcccacataattttccgccgccgtaacccccgtcttccaatgcattccaggccgtttcaataaataatctttgtctgggatcaatcaactttgcttcatttggaaggatactgaaaaagtcacaatcaaatttatcaatctcatccatataggctatttttgtataggctgcatctttactgtacttggttccgctgttttttaatgactggtcagcatctttttttctgttcagcggaatgtccctgatgaactcttttcctcgtaaaagtaaatcccaatattcatttacgtgattggcttcgccgattctgcatgataaaccgacaatggcaatgtcatctccggaaatgtctttggccccttcctcgtttttttgtttctttacattcagagtttgatttgtaaaagcggccgcttttaaattacttaaacttataaagtctgttttcatttttttacctcgctgagaatcactagataggtaatcatacctgtcaaacttcaaagtcttcaaagtgtttttttgtgtttgtttcagaaaataattgattaaatctttttttctgttcatctattggggtttttttggttcgaaacactgacttcagcatttctactgccatatgcatttgttctcttgacggctgacgacctgatgtttcaagttcagcctgtatggcagctactttttcatatggttcgattacacctttggcgtattcctcattgttccagttgtaatttttagtagcaaccgcgatccctaaacttctcgagataatagaaaaaccggcttgcagtgaaacagattcgttcaaaagagtctcttttataattttcacgtcctcttctttgtcgtagctgtacgatttgatgtcagcgatattgtttcttacaagattccttaatacagatttcggcccaaattcaatcacagtatcagtatggtttgcttctaaatacttcatgattcccatccaatttaccggttttacgatttgagttcccagtatgtcagccatttgctgtttatccgaatatggaagagccgtcacattagataaaactttgtattttggagttctgagatcatacttttttaactcatggctgaatttttccgcagcaaaacccatgatcggagaatgaaaagcagcacttacatttaatttaaaaatgtctgctcctctggctttaagagtttcactaagctcttcaactgctgccgcttctccggataccacaacatctttatatccattgtagttagaaacagcaatcgtttttcctcttgaagagagagattcgcactcttctactgctattctttcatccaggttcctgataacagccattgctccggtcccttgtgcggcagcttctttcattaataatcctctggctctcaccagctttacagcgtcctggaaatccaaaacgtcactgcaaaccaaggcagaatattctcctaaactatggccggcgatgtattcaggttcttttccgatctcttccatgtagattctgaattgtgcaatacttgttgccaggatggccggctgagtattttctgtttgagatagctcagcggcacttccatctatacataatttcttcaggtcaaatcccaatgcatcactggcttcgtcatacgtttttttagcgataataaaattgtcacataaacgtttgcccattcctgcatattgagatccttgtcctgaaaataaaaaacctattttcgacatttaaatacctccaaagtctctataatgcctgatttgccttacattctgccgatcagcaaaatgtaaggcagaaccggccgctttatattgaattgtctgctttgtctgctgtaatcacttgaatcaaattcatgtagttataaaataaatccttcattttgtgctcatttagtttttgatggttatatataaaaacgatttctgcttcggatggcttttcatgaactgcaaaaaccagatcatataattctgagtactctttttttgattcattactaatataaaaaagaggaaaaacatcttgggccgaacttgatttcttatagtgagtattcaaatcgtattgatctgaatcctcttgattctcaatctgctccttcgccatacgaataatatcgtgaaaattctcgatatcagacagatcaaaagacagctgactcatccgatcatctccatgacccgaaaattggatatgaaccaagttttgctggctgacatcagctaataaaaatacataacccgctaataaaacatgagaaatatcatatttgtaggtattgcatattgtttttaaaccatcataataattcgcatttaccgcatattcgtgcatggctgtatgactttgtccagttgattccgagatgtattcaagcggtaaagtaataggaatgatttctttttccaaggacactgctatctccgcaaaggctatagctgattctatatattcggacaatctgtaaatagtcggatatgcaaacaagtcagcaatttgaatttgttttggatacagcttctgaagctcattataaactgcaacgattttgattgaattaccgcctgcttcaaagaagttatcatgtattccaggctcttctatttttaaaacatcggtccaaacacggctgatacttttttgtacatccgttaccgcttcctcaaaaggccggtcaaaacctgttctatctataacaggttcaggcagtgccaggacatttatttttccgtttgctgtcagcggaatttggtcaattttcataaagatctgcggaatcatatactcaggaagcacaggtgataataacttaataaattctgaaggatatacagtgctttctgccacataatacagaactaaatcttggactcctgcggaatttgtttttccggcagctacacattccttaactttttcgtgttggtttactatgctttcaatctcttccaattctatccgataccctctgatctttacctgattgtccattcttccgataacgtccagttcaccatttggcagccaccttgctaaatctcctgtcttatacatcttggttcctttaacaaacggattgtctacaaacttttgcgcagtcaaatcttcttttcctaaatatcctctggccattccggctccagcaatgcataattcgccagtactgccgagcggtacagtgtttccatcatgatctactatatatatctgtgtattcgcaatcggcttgcctatatttacactattttcattggttaagtctttcacagaagaccaaatcgtcgtctcagtcggaccgtacatattatagatcttcagatttttatatttttttagctcaaataacaattcccgttgaaatacctcgcccccaaccatgatggtcttcaatttctgaagactctccgtgctgttttctgcacttagcatcagctttaatctggatggcgtaagctgaatagtattgacatcagtctcaacaacgatcttgtttaacaagtacggatctctttgttccgcttcaccggctatgacaactttcagcccttgagttaaaggcagcagcaactctaatccgaatatgtcaaatgagcacgtggtgaccgaaagaaggacattgtcttgtgaaaagctgatcctgtctgttattcccttaataaagttatgaacggcacggtgctctacggcgacccctttcggttttccggttgatcccgacgtataaatgacatatgctaaatcttcggccctgttaataacatcaatgttcgcctccaactgatgtaataaatcctctgaatctatgttaaatatggttccgctgtacgttaattcatttggaagtccttcctcagttaacagcaggccgcttttactgtctttcagcatataattgatcctgtctgccggataatcaggatcaagcggtaagtagcatccccctgcctttagtattcctaatattcctataatcaatcggaaagaccttcttaccaaaataggaaccacaacattctctttgatgccgttttccctgagggctcttgccaattgatttgccttattattcagctccttataggtcaggaagtctccgttccattccagagcgattgcatcaggtgtccttacagcttgctcttcgaagagctcttgtaacgtcttttctttcttatatgataattccgtgcagttgaattctttcaccagcttttgtttctctgtctcatttaccatatcgatctgagaaactattacttcatgatcagccgctgcctgctgtaaaacgctaaccaggttatccaagattgaacttaccgtttctttactgtaaacactggcgttatatgtgattttcatatgcaattcgtcaccgggagcaattaaaagctctaaatcatagttggtttgttcaaacccatgttcagcagttatttttacactcgaacgggctgaatcttggaaaagatcctcattcaacgggtaattttcatacacgactacgtgattgattaatttattcttcatacttgtcaaagactgtatgtctgccagagaacaataactgtattcgttcgcttcaataaagtctttatttatttgtttagccaatgaaataaatgatgtatcacgttctcttttcactctgattggcactgcatttataaataagccgaccatattttcaattccgtttatctcactcggtctgcctgaaacaatggaaccaaataccacatcatttgtattgttatatttctgcagcaatatcccccatgctgtttgaacgatagaatttaatgtaatgctgtttgactcagcgatttttttcagcttagcggcggtttcaccgttaagcgctcccagtttttgatcatgctgatactcgtcagatttcaattccagttccggaaatgagatttcttgttcatatgcagaaaggtattccttccaatattcaaatgcacggtccttgtcctgctgatcaagccattcaagataacgactgtacggtacaggtgtttcttgaaggagttttttcccttcagccacgtcaccgtatagatccataagctcttttaacagaataccgacactccagccatccaaaataatgtggtggaaactgtatatgactttaaatttatttcttcccagcttgatcaccgatactctgatcagacaatctttgttcagatcaaacggagtattcctgtctctcaccttgaattgccctacaaaggcatccttcttctgctcctcccattggctgatatcatgatattgaatgtttagttttctttcttttaaaatggcttgtttaaatacacggaaaccgttatagaaaaatgacgttcttaatatttcatatttagcaatcagtctgtttaatgcgtcactgagaacttctgtattcagatttccttcaactgttatttcactttgttcgaaataagcgctagattgatggtcaatcacagcgttatacagcatgccttcctgcatcggtgaaagagaatgaattttttctacttcagcaccgcttgcaagaatttgatttaactcctctatttgaagatcgggatccccataatcccatggggttttctcagatattttcttattcacacaatgttctatgatctgatttattttcaattgataggctttcgtaaattgctcaatcgtctctcgtttatattggtttgcactgtaattgaacgaaaacatcagcctgccatccatgatatatccatttatttctatactatgtgtctttttatttcttccagatatgctcgttccggcggacaaaggtgatatttgaaataggttgctgcgatcttcttggccaaattcacccaagtagttaaaactgatatcaggttttaattgaaggtgaaccgagtccgacaaatatctgagtattccgtaaccaatcccgttttgggggatatgtctaagcatttcctttgtatacttaatggagcttgataaactattactttctgtcatatcgagaacaattgggtatattgtcgtaaaccagcctattgtgcgatggaccggggtttttataacactttcacggccgtgcccttcaagattcacaaggatcttctcgttgccggtccattctttggctgcaagtcccagtgagcaaagcaatatatcattaatttgtgtatgatatgctgcatttgtatttcttaaaagtgtttttgtttgatcctctgttaattcaattttaatttctttactatcttcataagagcagctttcggcaatgaaatcctttggaagaggttcaataatagccgtttctatggtctcccagtacccagcttccttttgaagagccttgctgtttgcatattctttcaattgacgcgcccattctttgaacgatgctgttttagtttccagctccaccttgttcccattaactgtttgaagataagctgttccaaaatcttccaataggattctccaagatactccgtcaatgatcatatgatgaatggttaatagaagatgatctccgtttttggttttaaataccgccagttttattaaaatccccttttccaagctcaattcgttctgcatacggtcagccagtgattcaattgccatggctggatcttctgtttgtgtcatatcaaatacgtctaaagtaaatgtttcttttgcctgtttaatgcccctattccattgcttaatttcaccgttttcctttttaaactgcatcctgagggcatcatgatgcctcaccaattccaaaaaggccgtttcgattgctttttcttctatgccggactttttgtaaagcataaaggcttggttatagtggttttcttgttcaaatctctgttctataaaccatttttgaatcggtgtcagatcaacgtctccttctacaatcgactgatctgcttgtatatcagctgattttacgtgagcactcaagtcttttatgtgcggatatttcattaaatctctgacttcaagttttaagccgtatttttggagttcggaaactactaaaatggatttaattgagtctccgccgatctcgtaatagttatagttaatcccgattgatttcatccccagaactttctcccatacgcatgcgagaatttgttcctttttattccgcggtgcttcatatgcagactccaatacatccgcaatatctataatcggcaatgatttcgtatctatttttccgtttgaacttaacggcattttttcaatctggaagatataacttggcaccataaataacggtaattctttagacagattttcttttaaagcataaacatctatttttttgtcggaagtaacataaccgcagagatatttatccccatgttggtcatctctcgctacaacaacagcctctcttatgtgactcattttcagaagccggttctctatttctcccgtttcaatacgataccctctgattttgacttgatcatcaattcttcctaaataatcaattgtcccgtccggcatccattttgccatatcccctgttctgtataacttagccccgggttcaaaggggttatctacaaatttttctgacgtcaagcccgctttatttttatatccgtccgcaagcccttctccgctgacacaaagttccccggctgcccctaaaggaagtaattccaattgttttcctaatatataaagcttagtattatccgcaggtttgcctattgatactgcattgccattgtctctttcaatatgatattgatgaatcatacacccgactgtagcctctgtcgggccgtattcattgtagattttgacatgaccgttaaatgcaccgtgtatcttttttgcaagcccggttttcagctcttccccgccgacgattattttttttatctttgacgtacttaaatctatattctccagcaatctcaaatgcgtcggcgttagcttaataatatccgctttattttcttctataattcttctgatcagaagagccttgtccggtccctcataaataataattttatttcctgaaataagcggtgtataaattgaagtaaccgttaagtcaaaagaaatagaagaatacagaggaaaatcaatatcttcatcatttacatatatcttatttgcccaatgaatataatttaccacgcctttatgttttaccatgacgcccttcggcagccctgtagtccctgaagtataaatcatgtaggcaaggtcttccgggcaactgacattcggcagattacttctgttatgcatatatagagcaggatcgcttaatgataaaatttctttattgaatgtaataccacctgacaatccgttttgaattaggagaatgtttgcatcactgtctttcagcatgtaatttactctttcatcaggatattcaggatctatcggcaaatacgctccccctgctttcagcaccccgataattccgatgatcatctcaaaagatctctctgtcatgattccgacaatgctgttttctctaattcctttttgtctcaaaagattagccaggctgtttgatttctcgtttagttctttataggttaatagcgtatcttcttggacagccgcaatacgttcaggtgttttttctgcctgctcttcaaataattgatgaatcgttttatttcgcggaaattcagctgccgtgtcattgaatatatggagcaatgtgtgcttctcctgttcaggaatcatatccaatttcattaaaggctgatctaggccggcagctgcactttgtaaaagcttcgtaaaatgggcacccattctctcggctgtttctttttcaaataattgactggagtattccaagtggaacttgattcctttatcaatttccgtcgcggttagcgttagatcgaattttgaaatattgatctcggtttgaatatgctcttccggatttggatccaagtgattttcaataccgtaatctgcattttcaagtacaaacatgacatcaaacagcgggttccggctcgaatctctttttaccccgagtttttgaacaatattttcaaattggtaatctgtattctcaaaatcttttaacgtatgatgtttgacctcttctaaaaacgctctgaatgttttatgttcctcaggaaaatttcttatggcgacggtattgacgaacatccccaccgtattctccagttcggtgtctgaccttccggactctgctgttccgatgatcacatcctgctggccgctgtattttgaaagcatgacattatataccgccagcagcaccatgtacaaagttgttcctgtttctttcgccaccgactttaagcttgatgttaacctttcatcggccgtaaagctgattcggcttccttcaaagcttttgactctcggccgctcataatcagtctgcagattgagaatcggcagatctccgcttaaccgcttaagccaatactcctcttgttcctttaacgcctcttttgttcctgagcttacttgccattctgaataatctttatattgcagcggcggctgttttagtttatgacccgcatacagcgcattgaattctttgcggattattccaaccgatacac

SEQ ID NO: 8 - DNA, 62216 bp, Bacillus subtilis
cccttgtgcctttacactctgcgaatgatttccaaccattctgagggaacctttgggcgcctcctaaaaggtaacggaggcgcccaaaggttccctcagaatggttggaaatcattcgcagagtgtaaaggcacaagggagcttgactgcgagacctacaagtcgagcagggacgaaagtcgggcttagtgatccggtggttccgcatggaagggccatcgctcaacggataaaagctaccccggggataacaggcttatctcccccaagagtccacatcgacggggaggtttggcacctcgatgtcggctcatcgcatcctggggctgtagtcggtcccaagggttgggctgttcgcccattaaagcggtacgcgagctgggttcagaacgtcgtgagacagttcggtccctatccgtcgcgggcgcaggaaatttgagaggagctgtccttagtacgagaggaccgggatggacgcaccgctggtgtaccagttgttctgccaagggcatcgctgggtagctatgtgcggacgggataagtgctgaaagcatctaagcatgaagcccccctcaagatgagatttcccattccgcaaggaagtaagatccctgaaagatgatcaggttgataggtctgaggtggaagtgtggcgacacatggagctgacagatactaatcgatcgaggacttaaccaatttgaatgtatgcttactgttatctagttttgagagaacactctcaatggtttggtggcgatagcgaagaggtcacacccgttcccatgccgaacacggaagttaagctcttcagcgccgatggtagtcgggggtttccccctgtgagagtaggacgccgccaagctatattatagtaaaggcagctcatcatgagctgccttttttgtgtttttctgcatacgttatataatatgagaaacgtaacgatatgcctttttgcaaaagcaggttttatgcttgtacaaagtggaaataatagagatagagcgatacagttgaaaaattttgcgaaacaccttatagtaagattaaagtcaaatatagtcaaagtcaataaaggagggggttgagtgggacataatatttctgacatcattgaacagtacttgaaacaagtattagatcaaaatggcaaagaaattttagagatcaaacgcagtgaaatcgctgataaatttcaatgtgttccttcccaaataaattatgtcatcaacaccagatttacaagtgaaagaggatatattgttgaaagtaaacggggaggcggcggttatattcgtattatcaaaattaaaatgaataacgaagtcgtcctcatcaataatattatttcgcagattcatacccacttgtcccaggcagcctctgatgacattattctcagactgttagaggacggagttatttcggaaagagaagctaaaatgatggtgagtgtaatggatcgttcagttctatatattgatttgcccgaacgggatgaactaagagccagaatgatgaaagcaatgctcacatctttaaaactaaagtaagcgggtgaaaagattgatttgtcaagaatgcaatgagagaccggccacttttcactttacgaaagttgttaatggagaaaaacaagaagttcatatttgtgaacaatgtgcaaaagaaaatagcgattcatacagtataagtggaaaccaagggttctcgatccataatttattatcagggctgctgaatatggagtcttcacttcaaaacaccggttctcaaatgttcggctactcagagcaaggcacagcttgtaagaaatgcggtatgacgtttcagcagctgagaaaaacagggcgtttcggctgtgcggaatgttacgatacgttctacagccaaattacgccgatcttgcgaaaagttcacagcgggaatacggtgcatgccgggaaaattccaaaacgaataggcggaaacctgcatgtaagacggcaaatggaaatgttaaaaaaagaacttgaatctttaatacaccacgaagagtttgaaagagcagcggaggtcagggatcagatccgatcgttagagcagaaattaaaaagtaaagacagtgagggggaacaagggtaatgtcgctcaagcattttattcaggacgcactaagcaattggatgaagcaaaagggacctgaaagtgacattgtactcagcagccgtatacggttggcccgaaactttgaaaatataaagtttcccgcccggtatacgaatgaagaagcctcatccatcattcagcaattcgaagatcatttttcaggaaaagaactgcctgatatcggtcaatttcatttaatcagaatgagtgaagctcagcctttggaaaaacgggtgctgatggagaaacatctgatcagcccgaatttaacggaatccccttttggcggctgtctgctttctgaaaatgaagaagtcagcattatgttaaatgaagaagatcatatcagaattcaatgcctcttccccggcttccagcttctcaacgccataaaagcggcaaaccaggttgatgactggattgaggagaaagtggattacgcctttggagagaagagagggtacttaacaagctgtcctacaaatgtagggacgggactaagggcttcagtcatgatgcatttgccgggtcttgtattaactaggcaaatgaatcgaattataccggcaattaatcaattaggtttagttgttagaggaatttacggtgaaggcagcgaagcattaggaaatatctttcaaatttcaaatcaaatcacactcggaaaatcagaacaggacattgtagatgatttaaacagtgtggctgcccagctgattgagcaggaacgttcagcccgagaagcgctttaccaaacctcgaaaattgaattggaggaccgggtattcagatcttacggcgttttatccaactgccgtatgattgaatcaaaggaaacggcgaaatgcctttctgacgttcggctggggatagacctggggatcattaaagggctatcaagcaatatacttaatgaactgatgattttgacacagccgggttttctccagcaatattcgggcggtgcattacggccgaacgaaagagacgcgagaagagcggctcttatcagggaaaggctgcatttagaaatgagtgcaaatagacaggaggatgattcgatatgatgtttggaaggtttacagagcgagctcaaaaggtattggcactggcacaggaagaagcactgcgcttaggccatacaaatatcggaactgaacatatactattagggttagtccgtgaaggtgaagggatagcatttaaagctttagaagcgcttggccttaattcagataaaatgcagaaagaagtggaaagtttgatcggtcgagggcaggagagcaccacctctgttcctcattacacacctcgagccaaaaaggtaatagagttatcaatggatgaagctagaaagctaggacattcttatgtgggaacagaacacatacttctcggactgattcgtgaaggagaaggcgtagcggcgagagttctgaataatctcggtgtcagcttgaataaggcgagacagcaagtgctgcagcttctgggaagcaatgagacggggtcttctgcatccggtacgaacagtaatgcgaacacgccgacgcttgacagcttggcgcgtgatttaactgcgattgcgaaggaagacagtcttgatccggttatcggccgaagcaaagaaattcagcgtgttattgaggtattaagccgcagaacgaagaataaccccgttcttatcggagaaccgggtgtaggtaaaactgcgattgctgaaggccttgcacagcagatcatcaataatgaagtgccggaaattttacgtgataaacgcgtaatgacattagacatgggtacggttgtagccggtacgaaataccgcggagaatttgaagaccgcttgaaaaaagtaatggatgaaatacgtcaggccggcaatattattttattcattgacgaactgcatacactgatcggagcggggggagcagaaggtgcgattgacgcgtcgaatatcttaaaaccttcactggcccgcggagagcttcaatgcatcggtgcgacaacacttgatgaataccgtaaatatatcgaaaaagacgccgctctcgagcgccgtttccagccgattcaggtggatcagccgtcagccgatgaaagcattcaaattttaaaaggactccgtgaccgctatgaagcgcatcaccgcgtatccattaccgatgaagcgattgaagcggcggtaaaattgtccgaccgttatatttctgaccgcttccttccggataaagcgatcgatttaattgatgaagccggttcaaaagtgcgtctccgttctttcacaacgcctccgaacttaaaagagcttgagcagaaactcgatgaagttcgcaaggaaaaagacgctgctgttcagagccaggagtttgaaaaagcggcttcccttcgtgatacggagcagcgcctgagagaacaggtggaagacacgaaaaaaacgtggaaagaaaaacaaggccaggagaactccgaagtttctgtagaggatatcgcaatggttgtatccagctggaccggggtgcctgtatctaaaattgcccaaacggaaacagataagcttctcaatatggaaagcattctgcactcccgcgtcatcggccaggatgaagccgttgtagccgttgcaaaggctgtcagacgtgcaagagccggtctgaaggacccgaaacgcccgattggttcattcatcttcctaggccctacaggcgttgggaagacagagctggcaagagcgctggcggaatccattttcggtgatgaggaagcgatgatcagagtggatatgtccgaatacatggagaaacactcaacttcacgtcttgtcggttctcctccgggatatgtcggctatgatgaaggcggccagctgacagaaaaagtgagaagaaaaccttactctgtcgtactgcttgatgaaattgaaaaagcgcaccctgatgtgtttaacatactcctgcaagtgcttgaagacggacgattgactgattcaaaaggacgcactgtggatttccgcaacacgatcctgattatgacgtcaaacgtcggagcgagcgagctgaaacgcaacaaatatgtgggcttcaatgtgcaggatgaatcacaaaaccataaagacatgaaagacaaagtcatgggagagctgaagcgtgccttcagacctgagtttatcaaccggattgacgaaattatcgtcttccactcccttgagaaaaaacatcttacagacatcgtgtcgcttatgtctgatcagttaacaaaacgtctgaaagaacaagatctctctatcgagctgacggatgctgcaaaagcaaaagtggcagaagagggcgtcgatttggaatacggcgcacgtccgttaagaagagcgattcaaaagcatgtggaggaccggttatcagaagaactcctcagaggcaatattgataaaggccagcacattgttcttgatgttgaggacggcgaatttgtcgtaaaaacaactgctaaaacgaactaatatagtgacaaacatgaggcatacgtaagcgagtgtatgcctcactttgttatatagagaaatattcgataaggaagaggtcttacaacatatatggctaaatcaaaaacaaaattcatctgccactcatgcggttatgaatccgcaaaatggatgggaaagtgcccgggctgcggggcttggaatacaatggtggaagaaaccataaaaaaagcgccggcgaatcggcgggcggctttctcccactccgttcaaaccgtccagaaaccatcacccattacatcaattgaaacatcagaagaaccccgcgttcaaacaaagctcgaagaattcaacagagtgcttggcggcggcgttgtgaaaggctcgttagtattaatcggcggcgatcccgggatcggaaaatcaacgctccttctccaagtatccgcacaattagctgatacggccggcagcgtgctttacatttcaggggaagaatccgtgaagcaaacgaagctgcgcgccgacagacttggaatcaacagccaaatgttacatgttttatctgaaaccgatatggagtatatttcgtctgctatacaagagatgaaacccgcatttgttgtcgtagactccattcagaccgtttatcaaagtgatatcacctcagctcccggcagtgtatcacaagtaagagagtgtacggccgaattgatgaaaatcgcgaaaacaaacggcatacctatttttatcgtcgggcacgtcacaaaagaaggatcgatcgcagggccgagattgcttgagcacatggtcgataccgttctatactttgaaggagagcggcaccatacattccgtattttgcgggccgtaaaaaaccgtttcggctccacaaatgaaatgggcatctttgaaatgcgggaagaggggcttacggaagtgctgaacccttctgaaattttcttggaagagcgttctgccggggcatcgggttcgagtatcgttgcgtcaatggaaggaacgagaccgatcctggttgaaattcaggcgctcatatcaccgaccagttttggaaacccgcgccgtatggctacaggcattgaccacaacagggtgtcgttaattatggctgtgcttgagaagcgggtgggtcttttgcttcaaaatcaagatgcgtatttaaaggtcgccggcggggtcaaactggatgaaccggcgattgatttggcagtagccgtcagcattgcttctagcttcagagatacaccgccgaatcccgcagattgctttatcggtgaagtgggtctgacaggagaagtccgcagggtgtcaagaatcgaacagcgcgtaaaggaagcggcgaaactcggcttcaagcgcatgatcatacctgaggcgaatgcagacgggtggacaataccaaaagggattgaggttgtcggagtagcaaatgttgcagaagcgcttcgtacttcattaggaggatcataatagatggaaaaagagaaaaaaggggcgaaacaagagcttgacctgtctgcaattctgcagttcgttgcaccgggcaccccgctcagagccgggatagagaatgtacttcgggcaaatacaggcggcctgattgttgtcggatacaatgataaggtaaagcaagtcgtggatggcggttttcatattaatacatcatttgcgcccgctcacttatacgagctggccaaaatggacggtgccattattctaagtgattccggccagaaaattctttatgcgaatacgcagcttatgccggaagcgaccatttcttcttcagaaacgggaatgaggcaccgtacggcggaacgggtggcgaagcagaccggctgtctcgtcatcgccatttctgagcgcagaaatgtcattacgttatatcaggacagcatgaagtacacactaaaggacataggttttattttaacaaaggcaaatcaggccattcaaacgctcgagaagtataaaaccattttagacaaaacgattacggctttaaacgcattagagtttgaggagcttgtgacattcagtgacgtgctgtccgtcatgcatcgatatgaaatggtgctccgaataaaaaatgaaatcaatatgtatattaaagaactcggaacggaaggccacttaatccgtctgcaggtgattgaactgattacggacatggaagaagaggcggcacttttcatcaaagactatgtcaaagaaaaaatcaaagatccgttcgtgctgttaaaagagcttcaggatatgtccagctatgatctgcttgatgactccattctgtttaagctgcttggatatccggcttctaccaatcttgatgattatgtgctcccgagaggatacaggctgctgaacaaaattccgcgtctgccgatgccgattgttgaaaatgtggttgaggcgttcggatttttgccaagcataacggaagccactgtagaagagcttgatgatgtcgaaggtatcggcgaagtgcgcgccaaaaaaatcaaaaaaggcttaaaacgccttcaggaaaaacactatatagatagacagctttaagaatcgcttaaacctgtcggaatccgggtatattattgttagtttttgtttattctgaatttgtaggctctgacagtctgctgaaaaaatgctacttaaaaggaggtggaggtatgttaaaacgaatagttcaggcgttcttcattattgtgggcggcgttgtcggtatctttttaatacctgaattgtttgtgctgtcaaatatacaggacatacctttaataacaaacgcatatacgtctgctgcaattggtgctattatcttttttctcatcagtatatggacgacagaatatgtgattaattgggtaaaatggattgaagattctttgctgagagctccggtgccggatctgttattcgggagtctcggattggtttttggacttatcatcgcatatctcattgtaaacgtgattccgctggacaatattccgtaccgtatattcagcaccatcattccggtctttctggctttctttctcggttacctgggcttccaagtcggatttaagaaaaaggatgaactgatcagtcttttctccatttctgcaagaatgcagaagaaaaagggaagtgctgatgaggagcaggaggaacaggataaaaggctgaaaatcttggatacaagtgttattattgatgggagaattgcagatatttgtcagacgggctttttagaaggcgtcattgtcattcctcaatttgtgctggaggaattacagcatatcgctgattcttcagatgttttaaaacgtaacagaggacgccgcggactggatatcttgaatcgcattcaaaaggaactggatattacggttgaaatttatgaaggcgacttcgaggacattcaggaggttgacagcaagcttgtcaaacttgcgaagctgacatccggtgtcgttgtgacgaatgattttaatttaaataaagtatgtgagcttcagaaggttgcggtactgaatattaatgaccttgcaaacgcggtgaagccggttgtgcttccgggcgaagagatgaatgtgcaggtgattaaggacgggaaagagcataatcaaggtgtggcttacttggatgacgggacgatgattgttgtggaagaaggccgcaattatatagggaaacatattgatgtgctcgtaaccagcgtactgcagacagcggcgggacgaatgatttttgccaagcccaagctgcttgagaaagctctttaagagggagttcatatggagtatgttgtcgttattccggctgccggacaaggaaaacggatgaaggccgggaaaaataagctgttcatcagcttaaaaggtgcgcctgttattatacacacactgcgggtttttgaaagccacgcaccctgtcagaaaataatcctggtgataaacgagagtgaacgggaagattttcgccagctgctggctcaatttccgattcagacggaaattgagcttgttaccgggggggcggagcgtcagcacagtgtatacgaaggactgaaagtgattgataaggaatcggtcgtacttgttcatgacggagcgcgcccgtttgtcacacatcagcatatcgataagctcgttgaaacagcagaggaggcgggagcggctgtcctggctgttcctgtgaaagacacgataaaacgggcggaaggctcccgggttgcggagacctttgatcgttcaagcttgtgggccgttcaaacgccgcaggcttttcgtctttctttattgaagacggcgcatatggaagcggaaaacaaaggctttttaggtacggatgacgccagcctcgtcgagcgtcttgatggatatcaggtgagtatcgttgaaggcagctataccaatattaagctgacaacgccggatgacctgatatttgcggaagcaatcatgaaagcggaaagtgggaatcataatgtttagaatcggacaaggatttgatgtgcatcaattaacggaaggccgtcctctcatcatcggcggaattgaaattccttatgaaaaggggctgctcggacattcagatgctgatgtattgctgcatacagtcgcagacgcgtgtctcggagcggcaggtgaaggagatatcggcaagcatttcccggatactgatccggaattcaaggatgcggattcttttaagctgcttcagcatgtctggaacattgtaaaagaaaaagggtacgtactcggaaatatagactgcacgattattgcgcaaaagccgaaaatggcgccgcacattgatgctatgagaaaacggatagcggaaggccttgaggcggacgtctctcaagtaaacgtaaaagcgacgacgacagaaaagctcgggtttaccggaagagccgaaggaattgccgctcaggcgaccgttctgatccaaaaagcctgatcattgttttgatgcccggtctatttggtggtagaatagatacatatattcggctagaggctacagacgagatgaaaggaagtatttgaacatgggaaatgaagtacgcgttcgttatgcaccgagtccgaccggacatttgcatatcggtaacgccagaacggcgctttttaactatttatttgcccgcagccaaggcggaaagtttattatccggattgaggatacggacaaaaagcgaaatattgaaggcggagagcaaagccagctcaactatttgaaatggctcggcatggactgggatgaaagtgtggatatcggcggagaatacggcccgtaccgccagtctgagcgtaacgacatttacaaaaagtactatgaagagcttcttgaaaaagggcttgcttataaatgtttctgtacggaagaagaacttgagaaagaacgtgaagagcaaatcgcccgcggggaaatgccgcgctattccggcaaacacagaaacctgactcaggaagagcaggagcagtttttagccgaaggcagacagccgagcatccgtttccgcgtgccggaagggaaaatcatcgtatttaacgatatcgtaaaaggcgagatttcttttgaatcagacggcatcggcgactttgtcatcgtcaaaaaagacggaacaccgacgtataactttgccgtcgcgattgacgattacttaatgaaaatgacgcacgtgctccgcggtgaggatcacatttcaaatacaccgaaacagatcatgattttccaggcattcggctgggatgttcctgtcttcggacatatgacgcttatcgtaaacgaaagccgcaaaaaattaagtaaacgtgatgaatcaattatccagtttattgagcagtatgatgagctgggttacctgcctgaagcgctgtttaactttatcggacttctcggctggtctcccgtcggtgaagaagagcttttcacaagagaacaattcattgaaatttttgatgtaaatcgtttgtctaagtcaccggctctgtttgatatgcataaactgaaatgggtcaacaaccaatacgtcaaagcgctggatcttgatcaagtggttgagctgaccctgccgcacctgcaaaaagcaggaaaagtcggcactgagctttctgccgaggagcaggaatgggttcgtaaattaatatctctttaccatgagcaattgagctacggcgctgaaattgtcgagctgactgatttgttctttaaagatgagatcgagtataatcaagaggcaaaagccgttctggaagaggaacaggtgcctgaagtgctcagcgtatttgctgcgaagcttgaagagcttgaagaatttacgcctgagctgatcaaagcctcaatcaaagctgttcagaaagaaacaggccataaaggcaaaaagctgttcatgccgattcgtgtagcggttaccggtcagacacacggtcctgagcttccgcaggccattgagctgatcggcagagaaacagccgtcagacgcctgaaaagcatttaaatatacgattgttgacagggaagagtataaaacaatgaccattacagaaagaatcttcatcggctgagagagattcatgcgtcatgttttagaagtgcgcccttaagacctttgaagaacatttctgcggaaatcagtatttaaaggcggccgccgccgttaccggcttttaagttgggaaaacagtgacttgtttttcaaacagagtggaaccgcgcggtaaaagcgtctctgtcatgtttacatgcagaggcgctttttttataggcggaaaaacagactggagcggggagagaatggggggaagcatgtgttttttaaaatgcttaaagaagacatagatacagtgttcgatcaagatccggcagcaagaagctatttcgaagttgttttaacttattctggtttacatgctatatgggcgcatcggattgcacatgctttatataaacggaggtttttcttcctggcgcgcctgatatcacagattgcccgtttctttaccggaattgaaatccatcccggcgcgaccatcgggagaaggtttttcattgaccacggtatgggggtcgtcataggggaaacatgtgaaatcggcaataacgtgacggtattccaaggtgtcactctcgggggaacgggaaaagaaaaggggaagcggcatccgaccataaaagatgatgctttaattgcaaccggagcgaaggtgctcggctctattacggtcgggcagggttctaaagtaggggccggctccgttgtgcttcgtgatgttcccgacttttcgaccgttgtcggcataccggggaaagtcgtcattcagaacggaagaaaaatcaaacgcgatctcaatcaccaagacttgcccgatccggttgctgaccggttaagagcattggagcagcagatttttgagctgcaggctgaactggaagataaaaaagaaaggatcaaccaaaaatgaccattacactttataatacattgacacggaaaaaggaaacattcgttcctcttgaggaaggaaaagtaaaaatgtacgtgtgcggaccgactgtatacaactatattcatatcggaaacgcccgtccggcgattgtgtatgataccgtacgcaactatttggagtataaaggatacgatgtccaatacgtatcgaatttcaccgatgttgacgacaaactgattaaggcggccaacgagctcggcgaggacgtcccgaccatttctgaacggttcattaaagcgtattttgaagatgtgggcgccctcggatgccggaaagcggatcttcacccccgggtcatggaaaatatggacgccattattgaatttgtcagcgagctgattaaaaaaggctacgcttatgaatcagaaggcgacgtctatttcaaaacaagggccttcgaaggctacggcaagctatctcagcaatcaattgatgaactcagatcaggcgcgcgtatccgtgtcggcgagaagaaagaggatgcgctggactttgctctttggaaagctgctaaggacggagaaatttcatgggatagcccttggggaaaaggccgcccgggctggcatattgaatgctccgcaatggtgaaaaagtatttgggtgacgagatcgatattcatgccggcggtcaggacctgacattcccgcaccatgaaaacgaaatcgcccaatctgaagcattaacaggcaagacattcgcaaaatactggcttcacaacggatatatcaatatcgataatgagaagatgtcaaaatctctcggcaactttgttttggtgcacgatatcattaagcaatatgacccgcagcttttgagatttttcatgctgtccgttcattaccgccacccgatcaactattcggaagagctgcttgagaaaacaaaaaacgcgtttaaccgcctgaagacggcctacagtaatttaaaccatcgtttgattagcagcacgaatctgactgacaatgatgaggaatggctcgctaaaatcgaagagcaccgcactgcgtttgaagaagcaatggatgatgattttaatacggcgaatgcgatttccgtttggtttgatctggcgaaggtcgccaattactacatgcaggaagacaatacggcggatcacgtcattaaagcctttatcagcatgtttgacagaatcggatctgttctcggacttacgctcggcgaagaagagcttgtcgacgaagagattgaagagttgattgagaagagaaatgaagcccgccgcaatcgcgattttgctttgtcagaccagattcgcgatcagctgaaaagcatgaatatcattcttgaagatacggcccagggaactcgctggaagcggggagagtaagcggatgcttcaatttgaacaaatcaaagattcaaagcagttaaacggtcttgcgcttgcttatatgggtgatgccatttttgaaatatacgtccggcatcacctgcttaagcagggctttacgaaaccgaatgaccttcataagaaggcgagccggattgtatcggcaaaatcacaggcagacatattgttccgccttcaggacgaatcctttttcacggaggaagaggaagccgtgctgagaagaggcagaaacgcgaaatcagggacgacgcctaaaaacacagatgtacagacgtaccgccatagtacagcttttgaggctttactcggatacctttttcttgagaaaagagaagaaagactgaatcagctgattgctgaggctatacaagtcgggacgtcagggaggaaaacaaatgagtcagcaacatgattacgtcataggaaaaaacgcggtgattgagacgttgaagtcagatcgcaagctgtataagttatggatggcggaaaacacagtaaaaggacaggcgcagcaagttatggagcttgctaaaaagcgcggcgtcaccattcaatttgtaccgaggaaaaaactcgatcagatggtggaggggcagcatcagggtgttgtcgcccaggtggcggcatatgaatatgcacaattagacgaattatataaaagagcggaagagagaaacgaacagcctttctttctcatattggacgagctggaagaccctcataatctcggttccatcatgagaacggctgacgctgtcggtgcacatggcatcgtgattccgaaacgcagagcggtcggactgacttcgacggtcgcaaaagcttcgaccggtgcgattgaacacattcccgtcgtgaaggtgaccaaccttgcccggacacttgatgaaatgaaggagcggggggtttgggtcgtcggaacggatgcatccgcccgggaagactaccgctctatggacggcaagatgcctttggcgctcgttatcggaagcgaaggcagaggaatgggccggcttgtgaaagagaaatgtgattttctcattaagcttccgatggccggaaaagtcacttctctgaatgcgtcggtagcggccggccttctcatgtatgaagtctaccggaagcgcaatcctttaggggaatgaagacagatggacatcctgttagtagacggatacaacatgattggagcttggccgcagctaaaggatttaaaagcgaacagttttgaagaagcgagagatgtactgatccagaagatggcggaatatcagtcctacacgggaatcagagtcattgtggtgtttgatgcacacctggtaaaaggcatagagaaaaaacaaacgaatcacagagtcgaagtgattttcacacgggagaatgaaacggcggatgaacggatcgagaagcttgcccaggcgctgaataatattgcgacacagattcatgtcgcaacctccgattatacggagcagtgggcgattttcggacaaggggctctccgcaaatccgcccgggagctcctgagggaagtggatacgatagaacgccggattcaaaggcgggtttcaaagatcacttctgaaaaaccaccgggtaaaatcgagctgtccgaagaggttttgaaaacgtttgaaaagtggcgccgaggcggtctggattaggttgacgctttttcgcccattaatgtataatatttctatctacgtgcgccggggggatcgcagtgaatctacagaacagcaagggaaagttcaacaaagtgcaattttgccagttggaggacgagcaggtcattgaaaaggttcatgttggggatagtgatgcgttagattacttgattacgaagtaccgtaattttgtacgggcgaaagcaaggtcttattttttaataggggccgacagagaagatattgtacaggaagggatgataggcttatataagtctatccgagactttagagaggacaagcttacttcatttaaagcttttgcagaattatgcattacccgccagattattaccgcaataaagacagctacccgtcagaaacacattcctttaaattcctatgtttctttagacaaacctatttttgatgaagaatctgacagaacactgcttgatgtcatttcaggcgctaaaacgttaaatcctgaagagatgattattaatcaggaagaatttgatgatatcgaaatgaaaatgggagaactgctgagcgatctggagagaaaggtgcttgttttgtatttggacggaagaagttaccaagagatttcagatgacttaaaccgacacgtaaaatcaatcgataatgccctgcagcgcgtgaagcgcaagcttgaaaagtatttagaaataagagagatcagcctgtagcaggtttctgtgtcatattgacagaatttttctgactgtgctattttattaagataaatgaatgtttaggaaaaggtgtaacgacatgagaaaaaagattacgctggcatgcaaaacatgcggaaatcgtaattatacgacaatgaaaagctctgcatcagcggctgagcggttagaagttaagaagtactgcagcacttgcaattcacatacagctcatttagaaacaaaatagtgttcgctttttaaattgtggaggtcttttacatgcgcatgatgagtttctttaaagatgttgggaaagaaatgaaaaaggttagctggcctaaaggcaaagagttaacgcgctatacgatcacggtgatttcaacggttatcttttttgttatcttttttgccctccttgatacaggaatttctcaattaattcgtttaatagttgaataatgatcagcaatacgtgctataatagatcataatatcgtttgccaaaacccgttcagcgggttttttattgtgttgttgaaaaaaggattcataggccctgagcctattttttgttttacacttcatttttaaatgcggggagggaaggactgcagagtcctgatagaatggaaaagaattggtatgttgttcatacgtattccggttatgaaaacaaagtaaaagcgaaccttgaaaaacgtgtggaatcaatgggaatgcaggataaaattttccgcgttgtcgtccctgaagaagaagagactgatattaagaacggcaagaaaaaagtagtcaaaaagaaagtgttcccgggttatgtgcttgttgaaatcgtcatgactgatgattcctggtatgtggtccgcaacacgccgggcgttaccggattcgtcggatcagccggttcaggctcaaagccgactccgcttcttcctggcgaagcggaaaccatcttaaaacgcatgggcatggatgagcggaaaaccgacattgattttgaattgaatgagacagtcaaagtcatagacggacctttcgccaactttacaggatcaattgaagagattgattatgataagagcaaagtgaaagtattcgttaacatgttcggccgtgaaacgccggttgaattggaatttacccagatcgacaaattgtaatgtgaaaaaacttgaaattgctacatattaatgataatatagcaaaggtacgtcttggactaatccaaggcagctagcttgatatttcgtcattcatataaagaatgaaaccttgagtgggagggtttaccctattaccacatcacggacttaaggaggtgtgtctcgtggctaaaaaagtagtaaaagttgtaaaattgcaaattcctgctggaaaagctaacccagcgccgccagttggacctgcactaggtcaagccggtgtaaatatcatgggattctgtaaggagtttaacgctcgtacagctgaccaagctggtttaatcattcctgttgaaatttcggtttacgaagaccgttcatttacatttattacaaaaactccgcctgctgcagtattgcttaaaaaagcagctggaattgagtctggttctggtgaaccaaaccgtaataaagtggcaaccgttaagcgcgataaggttcgcgaaatcgctgaaacgaaaatgcctgacttaaacgcagcagacgttgaagcggcaatgcgcatggttgaaggtactgcccgcagtatgggtatcgttatcgaggattaatttgtttcttgtcgggttgcgagttttcacaagttcgcaacccttattcgtgggaggttattccgctataaccacataaggaggaaattttaaaatggctaaaaaaggtaaaaagtacgttgaagctgcgaagcttgtagaccgtgcgaaagcttacgacgtcgctgaagcagtggcgcttactaaaaaaacaaacacagctaaattcgacgctacagttgaagttgcttttcgtttaggggttgaccctcgtaaaaacgatcagcaaatccgcggtgcagttgtacttcctaacggaactggtaaaactcagcgcgtgcttgtattcgctaaaggcgaaaaagcaaaagaagctgaagctgccggtgcagactacgttggcgattctgattacatcgcgaaaatccagcaaggctggttcgaattcgatgtaatcgttgcgactcctgacatgatgggtgaagtcggtaaaatcggccgtgtgcttggaccaaaaggtcttatgccgaaccctaaaacaggaactgttacattcgaagtggaaaaagcaatcggcgaaatcaaagctggtaaagtagaataccgcgttgacaaagctggtaacatccatgttccgatcggaaaagtttctttcgaggatgaaaaacttgttgagaacttcacaacaatgtatgatacaatcctgaaagcaaaaccggctgcggctaaaggtgtttacgtgaaaaacgttgccgttacttctactatgggccctggtgtcaaagtagacgcttctactttcaacgtaaaataatatttgactttagatcagcattctgatatgattcaaaatgttgtaaaatataatatgtcatttataccgtagacagcaggggccgttgaggcttaatatcctgccgaggtgtatatatatcacagctattacgttacgtatgcttgtatatacagcctccatgtccacatggaggctttttatatgaaatcgtcgtcacagtcgtgatcacctagcggtataagtgttacacaaaatctacaggaggtgtaaccatgagcagcgcaattgatacaaaaaaagttgttgttgaagagattgcttctaaactgaaagaaagcaaatcaacgatcatcgttgactaccgcggacttaacgtttctgaagtaactgaactccgtaaacagcttcgcgaagctaacgtagagttcaaagtgtacaaaaacacaatgactcgccgtgcggttgaacaagctgaacttgatggtttgaatgatgtcttaactggaccgaatgcgatcgcattcagtactgaagatgttgtcgctccggcaaaagttcttaacgagttcgcgaagaatcacgaagctctggaaatcaaagcgggcgttatcgaaggaaaagtatcttctgttgaagaagtgaaagctcttgctgaacttccttcacgcgatggcttactttctatgttgcttagcgtacttcaagctccagttcgcaaccttgcacttgcagctaaagcagttgcagaacaaaaggaagaacaaggcgcttaatctgattttaccctaaaataaaacaaatggaggaatttcaaatggctttaaatatcgaagaaatcattgcttccgttaaagaagcaactgtacttgaattgaacgacctagtaaaagcaatcgaagaagaatttggcgtaactgctgctgctcctgtagctgtagctggcggagctgctgctggcggcgctgctgaagagcaaagcgaattcgaccttatccttgctggtgcaggttctcagaaaatcaaagttatcaaagttgttcgtgaaatcactggtcttggcttgaaagaagctaaagaacttgttgacaacactccaaaaccacttaaagaaggtattgcgaaagaagaagctgaagagcttaaagctaaacttgaagaagttggcgcttctgtagaagttaagtaatcttcacttgcctgtaggggaagctcgcttttatgaggcgggctttttctttgcttttctttaagtgccattataaaaggaggttctaataatgagtgatcactattattcagaaaaaccttcagttaaaagcgataaacagacatggtcatttacactgcggaacagatcttatacattcacaagtgacagcggcgttttctcgaaaaaggaagttgatttcggttcgcgtgtcttaattgaagcgtttgaagagccggagatcgatggtgacttcctggatgcaggctgcggttacggcccgatcggtctgtcactcgccggtgcatttacagaccggaccgtgcacatgattgacgtgaatgaaagagccgtagagctgtcaaatgaaaatgcagaaaaaaacggaataaaaaacgttcgaatttatcagagtgatttattttcaaatattgattctgctcaaacatttgcttctattattacaaaccccccaatccgcgccggaaaaaaagttgtccatgccatttttgaaaaaagcgctgagcatttaagggcttcaggtgaattgtggatcgttatacagaaaaaacagggcgggccttctgccattgaaaaactgaaggagctttttgacgaagtttctgtggttcaaaaaaagaaaggctattatatcataaaagcaaaaaaagtttgacttgaattttcagctatgttaatattgtaaaatgccaatgtatatattttgcatgatatgctgaaataatcatagtgcatgtataaattatacaaacatggaaatgctaataaaatcggtatttgtttttggatgtggttttcttaattagaaacccttttttcttttgtcttgtaaaagtatttctttatcgtaagagatgcttattacacatataatacgcatgatttgaggggtgaatcagttgacaggtcaactagttcagtatggacgacaccgccagcgcagaagctatgctcgcattagcgaagtgttagaattaccaaatctcattgaaattcaaacctcttcttatcagtggtttcttgatgagggtcttagagagatgtttcaagacatatcaccaattgaggatttcactggtaacctctctctagagttcattgactacagtttaggagatcctaagtatcccgttgaagagtcaaaagaacgtgatgtgacttactcagctccgctgagagtgaaggttcgtttaattaacaaagaaactggagaggtaaaagaccaggatgtcttcatgggtgatttccctattatgacagataccggtacttttatcatcaacggtgcagaacgtgttatcgtatctcagcttgttcggtctccaagtgtatatttcagtggtaaagtagacaaaaacggtaaaaaaggttttaccgcgactgtcattccaaaccgtggcgcatggttagaatacgaaactgatgcgaaagatgttgtgtatgtccgcattgatcgcacacgtaagttgccggttacggttcttttgcgtgctctcggcttcggttccgaccaagagattctcgatctcattggtgagaacgaatatctccgcaatacactggataaggacaacactgaaaacagtgacaaagcgcttcttgaaatctatgagcgccttcgtcccggagagccgcctacagtagaaaacgcaaaaagcttgctggattcccgtttcttcgatccgaagcgatacgaccttgcgaatgtaggacgctataaaattaataaaaagcttcatatcaagaaccgcctgtttaaccagcgccttgcagaaacactggtggatccggaaaccggtgaaattctcgctgaaaaagggcagattcttgacagaagaacacttgataaagtactgccatacttagaaaatggaatcggcttcagaaagctttatcctaacggcggcgtcgtcgaggatgaagtgatgcttcaatccattaaaatctatgctcctaccgatgcagaaggagagcagacgatcaatgtgatcggcaatgcttacatcgaagaggcgattaaaaacattacgcctgctgatattatttcttctatcagctacttcttcaacctcctgcacggagtgggcgacactgatgatatcgaccatctcggaaaccgccgtctgcgttctgtaggtgagctcctgcaaaaccaattccgtatcggtttaagccggatggaacgtgtcgtacgtgaaagaatgtctattcaagacacgaatacaattacgccgcagcagctgattaacatcagacctgttattgcgtctattaaagagttcttcggaagctcacagctttctcaattcatggatcagacgaacccgcttgctgaattgacgcacaaacgccgtctgtcagctctcggaccgggcggtttgacacgtgagcgtgcaggtatggaagtacgtgacgttcactactctcactatggccgtatgtgtccgattgaaacgcctgagggcccgaacatcggtttgatcaactcattgtcatcatttgcgaaagtaaaccgctttggtttcattgagacgccataccgccgcgttgatcctgaaacaggaaaagtaacgcctagaatcgactacctgactgctgatgaagaggataactatgtcgtagcccaagcgaatgctaagctgagcgatgacggttctttcttggatgacagcatcgtagcgcgtttcagaggggaaaacaccgttgtagcccgcaaccgcgtggattacatggacgtatctcctaaacaggttgtatctgctgcgacagcatgtattccgttcttggaaaacgatgactcgaaccgcgccctcatgggagcgaacatgcagcgtcaggctgtgcctttgatgcagccggaagctccgatcgtcggaacgggtatggaatacgtatccggtaaagactctggtgcagccgttatttgtaaacaccctggtatcgttgaacgggtggaagcgaaaaacgtatgggtgcgccgctatgaagaaattgacggccaaaaagtaaaaggcaacctggataagtacagcttgctgaaattcgtccgctccaaccaaggtacgtgctacaaccagcgtccgatcgtcagtgtcggcgatgaagtagtcaaaggagaaatccttgctgacggaccttcaatggagcttggtgaacttgctctcggccgcaacgtaatggtcggcttcatgacatgggatggttacaactatgaggatgccatcatcatgagtgaacgccttgtgaaagatgatgtatacacatctattcacattgaagaatatgaatcagaagcacgtgatacaaagcttgggccggaagagatcacccgcgatattccaaacgtaggggaagacgcgcttcgcaatcttgatgaccgcggaattatccgtatcggtgcggaagtcaacgacggagaccttctcgtaggtaaagtaacgcctaaaggtgtaactgagcttacggctgaagaacgccttcttcatgcgatctttggagaaaaagcgcgtgaagtccgtgatacttctctccgtgtgcctcacggcggcggcggaattatccacgacgtaaaagtcttcaaccgtgaagacggcgacgaacttcctccgggagtgaaccagcttgtacgcgtatatatcgttcagaaacgtaagatttctgaaggtgataaaatggccggacgtcacggaaacaaaggggttatctcgaagattcttcctgaagaagatatgccttaccttcctgacggcacgccgatcgatatcatgcttaacccgctgggtgtaccatcacgtatgaatatcggtcaggtattagaacttcacatgggtatggctgcccgctacctcggcattcacatcgcgtcacctgtatttgacggcgcgcgtgaagaagatgtgtgggaaacacttgaagaagcaggcatgtcaagagacgctaaaacagttctttatgacggccgtacgggagaaccgtttgacaaccgtgtatctgtcggaatcatgtacatgatcaaactggcgcacatggttgatgataaacttcatgcccgttctacaggtccttactcacttgttacgcagcagcctctcggcggtaaagcccaattcggcggacagcgtttcggtgagatggaggtttgggcgcttgaagcttacggcgcagcttacacgcttcaagaaatcctgactgtgaagtccgatgacgtggtcggacgtgtgaaaacatatgaagccatcgtcaaaggcgacaatgttccagagcctggtgttccggaatcattcaaagtattgatcaaagagcttcaaagcttaggtatggacgtaaaaatcctttcaggcgatgaagaagaaatagaaatgagagatctagaagacgaggaagatgcgaaacaagctgacggccttgcattatcaggtgatgaagcgccggaagaaacagcatctccagacgttgaacgtgacgcagtaacgaaagaatagtctctgattgataaaggcaagtgacatcggttaatccgaagataaaaagggaggtaggccccttgctagatgtgaacaattttgagtatatgaacatcggtcttgcttcaccggataaaatccgttcatggtcttttggtgaagtgaaaaagcctgaaacgataaactatcgtacgttgaaacctgaaaaggacggcctgttctgcgaacgcattttcggaccgactaaggactgggaatgtcattgcggcaagtacaagcgggttcgttataaaggcgtagtttgtgaccgttgcggagttgaagtaacgcgggctaaagtccgtcgtgagagaatggggcatattgaactggctgccccggtttctcacatttggtatttcaaaggtattccgagccgtatgggtcttgtattggatatgtcaccgcgtgcgctggaagaagttatttactttgcttcttacgtcgtaactgacccggccaatacaccgctcgaaaagaaacagcttttatctgaaaaggaataccgtgcgtatctggataagtacggaaacaaattccaagcctctatgggtgcggaagccattaataaacttctgcaggacatcgaccttgtcaaagaagttgatatgttaaaagaagagctgaagacttctcaaggacagcgccgtacacgtgcgatcaaacgccttgaagtgcttgaagccttccgtaattcaggaaacaagccgtcttggatgatcctcgacgtgcttccggttattccgcctgaattaagaccgatggttcagcttgacggcggacgtttcgcaacgtctgatctgaacgacctttaccgtcgtgtcatcaaccgtaataaccgtttaaaacgtctgttagacctcggcgcgccaagcatcatcgttcagaacgaaaaacgtatgcttcaggaagcagtcgatgctctgattgacaacggacgccgcggccgtccggttaccggaccgggtaaccgtccgcttaaatctctttctcacatgctgaaagggaaacaagggcgtttccgtcagaaccttctcggtaaacgtgtagactactcaggccgttccgttatcgtcgtaggtccgcatctgaaaatgtatcagtgcggtttgccgaaggaaatggcgcttgagctcttcaagcctttcgtcatgaaagagcttgttgaaaaaggccttgctcacaatatcaagagcgcaaaacgcaaaatcgaacgcgtgcagcctgaagtatgggatgtacttgaatctgtcattaaggagcatccggtcttactgaaccgtgcccctactcttcacagattaggtatccaggctttcgaaccgacgcttgttgaaggacgcgccatccgtcttcacccgttagtatgtacagcttataacgctgactttgacggtgaccaaatggcggttcacgtacctttatcagctgaggctcaagctgaggcgcgcattctgatgcttgcggcccaaaacatcttgaaccctaaagatggtaaaccggttgttacgccgtctcaggatatggtattaggaaactactacctgacgcttgagcgcgccggagcagtcggcgagggtatggttttcaaaaatacggacgaagcgcttcttgcttatcaaaacggttatgttcaccttcatacgagagttgctgttgcagcgaactcccttaagaatgtgacatttactgaagaacagcgttcaaaattgttaattacaactgtcggtaagctcgtcttcaatgaaattcttccggaatcattcccttacatgaatgaaccaacgaagagcaacattgaagagaagacacctgaccgtttcttcttagataaaggtgctgacgtaaaagctgtgattgctgagcagccgatcaacgcaccgtttaaaaaaggcattctcggtaaaatcatcgcggaaatctttaaacgattccatatcacggaaacgtctaaaatgcttgaccgcatgaaaaacctcggtttcagatattcaacgaaagccggcatcacagtaggggtttctgatatcgtcgttctcgatgacaaacaggaaatccttgaagaagcacaaagcaaagttgataatgtcctgaaacagttcagacgcggtttaatcaccgaagaagaacgttatgaaagagtcatttcaatttggagctcagcgaaagatgttatccaaggcaaactgatgaaatcattagacgaagtcaacccgatctacatgatgagtgactcaggagcccgtggtaacgcatctaactttacacagcttgcgggtatgcgcggtctgatggccaacccggctggacgaatcattgaattgccgattaaatcaagtttccgtgaaggcctgacagttttggagtactttatctccactcacggtgcgcgtaaaggtcttgccgataccgccctgaaaacagctgactcaggttaccttacacgccgtcttgttgatgttgcgcaggatgttatcattcgtgaaacagattgcggaacagaccgcggtattcttgcaaaaccgctcaaagaaggcacggaaatcatcgagcgtctggaagagcgtctgatcggacgtttcgccagaaaacagatcaaacatcctgaaacgggtgctgtgctcattaacgaaaatgaattgatcgatgaagataaagcgctggaaatcgttgaagccggaatcgaagaagtgtggatccgttctgcgttcacatgtaacactcctcatggtgtatgtaaacgatgctacggacgtaaccttgcaaccggaactgatgttgaagtcggcgaagcagtaggtattatcgccgctcaatctatcggtgagcctggaacacagttaacaatgcgtacgttccacacaggcggggttgccggagacgatatcacacaaggtcttccgcgtatccaagagcttttcgaagcgcgtaatccgaaaggtcaagcgacgatttctgagattgacggtacaattgccgaaatcaatgaagtccgcgacaaacagcaggagattgttgttcagggcgctgttgagacacgttcatacacggcaccttacaactcacgcctgaaagtggctgagggtgatcagattacccgcggtcaagtgctgacagaaggttctatcgatccgaaagaacttcttaaagtcactgacctgacaacggttcaggaatatcttctgcatgaggttcagaaggtttaccgtatgcagggggttgaaatcggcgataaacacgtagaagtaatggttcgccagatgcttcgcaaagtccgtgtgatcgatgccggagatactgatgttctccctggcacattgcttgatattcaccaattcacagaagcgaacaaaaaagtgctgcttgaaggcaatcgacctgctacaggccgtcctgtccttctcggtatcacaaaagcttcactcgagacggattcattcttgtctgccgcatcattccaagaaacaacacgcgttcttacagatgctgcgattaaaggtaagcgcgatgaacttctcggcctgaaagagaatgttatcatcggtaaactggttccggccggtaccggtatgatgaattacagaaaagtaaaacctgtttcaaacgttcagccttcggaagatatggttccggctgaataatagaaactgctgcaggaaaggctgtttcgacagcttttcctcagtattacaattattctggcggtggactgcactaaaaaatgtcatacgttgttgacatccgtcccgcagagtgataatataaccaaggtgctcgaaataaaacctgttactttggaggatatgtttatgtcttatgataaagtatcacaggccaaatcaattattattggtacgaagcaaacagtgaaagctctaaaacgaggttcagtgaaggaagtcgtcgtggcaaaagacgcggattcagttcttacagctggcgttatccagcttgcaaagaaccaaaataccgctgtctgtatggtggattccatgaaaaagctcggcaaagcctgcggaattgaagtgggagcagcagctgttgccattatgttatagcgtactttttgtttttatataagatatcaatcttgtgtaaagacattgttttttgcctaatgatgaaccacctgggtatgtgggttataaaacgtaatgaagggaggaacacaacatgcctacaattaatcagctaattcgcaagggacgcgtgagcaaagttgaaaactctaagtcacctgcactaaacaaaggatacaacagctttaaaaaagagcacactaacgtatcttctccacaaaaacgcggggtatgtactcgtgtgggtacaatgacaccgaaaaaaccgaactcagcacttcgtaaatatgctcgtgttcgtttgactaacggaatcgaggttactgcctacattcctggtatcggtcacaacctgcaagagcacagcgttgtactgatccgcggcggacgtgtaaaagacttaccgggggtacgctaccacatcgttcgtggcgcgcttgatactgccggagttgaaaaccgtgcacaaggccgttctaaatacggtacgaaacgtcctaaagcaaagtaatcaaataaatcattaaaactatgaagggaggatattcagatgccacgtaaaggtcctgtagcaaaaagagatgttttacctgatccgctttacaactctaagctggtatcccgcctgatcaacaaaatgatgatcgacggtaaaaaaggtaaatctcaaacaatcctatacaagtcattcgatatcattaaagaacgcactggcaatgatgcaatggaggttttcgaacaagcattgaaaaacatcatgcctgtacttgaagtaaaagcacgccgtgtaggtggagctaactaccaagtgcctgtagaagttcgtcctgaacgccgtacaactcttggtcttcgctggttggttaactatgcgcgtcttcgcggagaaaaaacaatggaagagcgcctggctaacgaaattcttgatgcagctaacaacactggcgctgccgttaagaaacgtgaagacactcacaagatggcagaagcgaacaaagcatttgctcactaccgctggtaggattcatataatcaaaataataattccctaataaggaaggagaaattacccaatggcaagagagttctccttagaaaaaactcgtaatatcgggatcatggctcacatcgatgccggtaaaacgactactacagaacggatcttgttctacacaggccgtatccacaaaattggcgaaactcacgaaggtgcttcgcaaatggactggatggagcaggaacaagaacgcggtatcacaatcacttctgcagcaacgactgcacagtggaaaggttaccgtgtaaacatcatcgatacaccgggacacgtagacttcacagttgaagttgaacgttcactccgtgtacttgatggtgcggttgccgtacttgatgctcaatcaggtgttgagcctcagacagaaacagtatggcgccaagcaacaacttacggagtgccgcgcgttgtatttgtcaacaaaatggacaaaatcggcgcagacttcctttactctgtaggcactttaagagaccgtcttcaagctaacgctcacgcaattcaattgccgatcggcgctgaagacaacttcgaaggtatcatcgacttagtagaaaacgttgcgtatttctacgaagatgaccttggaactcgttcagatgcgaaagaaatccctgaagagtacaaagagcaagctgaagagcttcgcagcagcctgattgaagctgtagctgagcttgatgaagagcttatggaaaagtaccttgaaggtgaagaaatcactatccctgaactgaaagctgctatccgtaaaggtacactgaatgttgaattctaccctgtacttgttggatctgctttcaaaaacaaaggtgttcagcttgtacttgatgctgttcttgactaccttcctgcgccaactgatgttgctgcaatcaaaggtgtacgtcctgacacagatgaagagatcgttcgtcattcttctgatgaagagccattctctgcacttgcatttaaagttatgactgacccttatgtcggtaagctgacattcttccgcgtatattccggtacacttgattccggttcatatgtaaagaactctacaaaaggcaagcgtgagcgcgtaggacgtatccttcaaatgcacgctaacagccgtgaagagatctctactgtttacgctggagacatcgcagctgctgtaggtctaaaagatacttctactggagatactctatgtgatgagaaggatcttgtaatccttgaatcaatggaattcccagagcctgttatcgacgtagcgattgagcctaaatcaaaagctgaccaagataaaatgggtatcgctttagcgaaacttgctgaagaagatcctacattccgtacacaaacaaaccctgaaacgggtcaaacaatcatctctggtatgggtgagcttcaccttgatatcattgttgatcgtatgaagcgtgagttcaaagtcgaagctaacgttggtgctcctcaagttgcgtaccgtgagacattccgtaccggtgcaaaagttgaaggtaaattcgtacgtcaatcaggcggacgcggtcagttcggtcacgtttggatcgaatttgaaccgaacgaagaaggcgctggctttgaattcgaaaacgcaatcgtcggtggtgttgttcctcgtgaatacatcccagccgtacaagcaggtcttgaagactctcttgaaaatggtgtcctagccggattcccgctaatcgacatcaaggcgaaactttttgatggatcttaccatgatgttgactcaaacgaaatggcgtttaaagtcgctgcttctatggcattgaaaaatgcagtcagcaaatgtaacccagttcttcttgaaccaatcatgaaagttgaagttgttattcctgaagaatacatgggagacatcatgggtgatgttacttctcgtcgcggacgcgtagaaggtatggaagctcgcggtaacgctcaagttgtgcgtgcgatggtacctcttgctgaaatgttcggttacgctactgcccttcgttctaacacgcaaggacgcggtacgttcacaatgttcatggatcactacgaagaagtgccgaagagcatcgctgaagaaattatcaaaaaaaataaaggcgaataattgattttgccacttaactcaagtataactactattgtaagatgaggaagtgagagcttgctttcactttctatcactctatacattactaattaaaagctcttaaggaggattttagaatggctaaagaaaaattcgaccgttccaaatcacatgccaatatcggtacaattggacacgttgaccatggtaaaacaacattaactgctgctatctcaacagtacttcataagaaatctggtaaaggtacagctatggcgtacgatcaaattgatggtgctccagaagaacgtgagcgcggtatcacaatctctactgcacacgttgagtacgaaactgacactcgtcactatgcacacgttgactgcccaggacacgctgactatgttaaaaacatgatcactggtgctgcgcaaatggacggagctatccttgtagtatctgctgctgatggcccaatgccacaaactcgtgagcacatccttctttctaaaaacgttggtgtaccatacatcgtagtattccttaacaaatgcgacatggtagacgacgaagagcttcttgagcttgttgaaatggaagttcgcgatcttcttagcgaatacgacttccctggtgatgatgtaccagttgttaaaggttctgctcttaaagctcttgaaggtgacgctgagtacgaagaaaaaattcttgaacttatggctgcggttgacgagtacatcccaactccagaacgcgacactgacaaaccattcatgatgccagttgaggacgtattctcaatcactggtcgtggtacagttgctactggccgtgtagaacgcggacaagttaaagtcggtgacgaagttgaaatcatcggtcttcaagaagaaaacagcaaaacaactgttacaggtgttgaaatgttccgtaagcttcttgactatgctgaagctggagacaacatcggtgcgcttcttcgcggtgtagctcgtgaagacatccaacgtggacaagtacttgctaaaccaggtacaatcactccacacagcaaattcaaagctgaagtttacgttctttctaaagaagagggtggacgtcatactccattcttctctaactaccgtcctcagttctacttccgtacaactgacgtaactggtatcatcaatcttccagaaggcgtagaaatggttatgcctggagataacactgaaatgatcgttgaacttatctctacaatcgctatcgaagaaggaactcgtttctctattcgtgaaggcggacgtacagttggttcaggcgttgtttctacaatcactgagtaatcgactcgttcattaatgcggggtcccttatggggcctcgtttttttgtttccccgctgattccatgtataatagaacgtatacaaattttaggagcagagcgatgaacgataacttcaagaaaaccaatcgtatttcaatgcttcagcaattgctgattaatggcagtgaacaaaccattatgattaatggtgatgacaggagtaatccgctgcttttgtttttgcacggcggtcccggcacgccccaaatcggctatgcgagaaaataccagaataagctggaaaagcatttcaccgttgtgaactgggatcagagaggggcgggtctctcttattcaaaggaaattccggcttcatctatgaccttggatcagctgacagccgataccattcatttgaccgaacgcttatgcaagcaattcagcaggcaaaaaatatatatcgccggctattcgtggggttcagttctggcgcttcatgttcttcaagagaggcctgatttgtattatgcgtatatcggtatcagtcaggtggttaatattcaaaaggaagaaacggaagcttaccggctgatgatggaatggagcaggcgacgcaaacatttcctgctggaaaagacgcttagctttatcggagcgcctccatgggagaaacagctgcagcgaacgttgtttctgctttgtatcgagatgaggggagggggctttacccatcatccgatcggtgctcttaaagcaggggggcgaatgctgtttggtgaaccgtacggtgtgagagggagtttcttagccgcgcggggacaaatgttcagcctgaaacacctgtgggaggatctcattttctttaatgccggggaatcagtttcttctattataataccgtgctgttttatgtcagggagatacgatttgacggtcccggggacgacgtcttatgaatattatcagaaggttgatgcgccgtataaagaatggcattggtttgagaactcagcccattcgcctcacttggaggaaccggatcgctttgccgaagttgtcagccggttcgcatcgttccatctttgaaagaaaacaggcatatccttgattaatcatggtatcacctgtataataatcaaagtgtgaaaaccacaaggttctttaaataaaccttgcaacatacgtctattttctgtataatagtgtatgttggtctttgactgcgatgaagtgagaggttgctgacacacccggccgctttgccatggcaaggtgatcaggtttttctcacggagaactgtctaacgtgatgtaggcgaaaaggagggaaaataatggcaaaacaaaaaattcgtattcgtttaaaagcatatgatcatagaatccttgatcaatctgcagagaagattgttgaaacggcaaaacgttctggtgccagcgtatctggtccgattccgttgccaactgaaaaatcagtttacacaatccttcgtgcggtgcacaaatacaaagattctcgtgagcaatttgaaatgcgtacacataaacgtttaatcgacattgtgaacccaacaccacaaactgttgatgctctcatgcgattagacttaccatctggtgtcgatatcgaaatcaaactttaattctaaaatatagaatgatcttaataggaggtgtgacgaatgaccaaaggaatcttaggaagaaaaattggtatgacgcaagtattcgcagagaacggtgatcttatcccggtaactgttattgaagcagctccaaacgttgttcttcaaaagaaaacagctgaaaatgatggctatgaagcgatccagcttggttttgacgataagcgtgaaaagctttcaaacaaaccggaaaaaggacacgttgcaaaagcggaaactgctcctaagcgcttcgttaaagaattacgcggcgtggatatggatgcgtatgaaattggtcaggaagtcaaggttgaaattttctctgcaggagaaatcgtagatgtaacaggagtatctaaaggtaaaggtttccaaggtgcaatcaagcgccacggacaatctcgcggacctatgtctcacggttcacgctaccaccgtcgtcctggttcaatgggacctgtagatcctaaccgtgtattcaaaggtaaactattacctggacgcatgggcggagatcaaatcactgtccaaaaccttgaaatcgtaaaagtagatgctgagcgcaatcttcttttgattaaaggtaacgtacctggtgcgagaaaaactttaatcactgttaaaagtgctgttaaatctaaataagtctcttaggaaaggaggaaattgatcatgccaaaagtagcattatacaaccaaaacggttctactgctggtgatatcgaattaaacgcgtctgtatttggaattgagccaaatgagagcgtagtattcgacgctattcttatgcaaagagcttccttacgtcaaggatctcacaaagtaaaaaatcgttctgaagtacgcggcggaggtcgcaaaccatggcgtcaaaaaggtacaggtcgtgcccgtcaaggttcaatccgttcaccgcaatggcgcggaggtggtgtcgtattcggcccaacaccacgcagctattcttacaaattacctaaaaaagttcgccgcttggcaatcaaatcagtattgtcttctaaagtgaacgacaacaacatcattgttcttgaagatcttactcttgatacggttaaaacaaaagaaatggcagctatccttaaaggattatctgttgagaaaaaagctttaatcgtaactgcggatgcaaacgaagcagtatctctttctgcacgcaacatccctggagttacagttgttcaagctaacggaatcaacgtgttagacgttgtcaaccacgagaagcttctgattacaaaagctgcggttgaaaaagtagaggaggtgcttgcataatgaaagatcctcgtgatgttcttaagcgccccgtcattactgaacgttctgctgatttaatgactgaaaaaaaatatacttttgaagttgatgtaagagctaataaaacagaagtgaaagatgcagttgaaagtatctttggagtgaaagttgacaaagtcaacatcatgaactacaaagggaaatcaaaacgtgtcggccgctacactggtatgactagccgtcgcagaaaagcgatcgtaaaacttactgcagacagcaaagaaatcgaaatttttgaagcttaattatctgtaaaaagaaggagggaaattcaaaatggcgattaaaaagtataaaccgacctctaacggacgtcgtggcatgacaacttcagattttgctgaaatcacgactgaccagccggaaaaatccttgcttgcgccccttcacaaaaaaggcggacgtaacaaccaaggtaaattgactgtacgtcaccaaggtggcggacacaaacgccaataccgtgttatcgacttcaaacgcgataaagatggtatacctggacgcgttgctacagttgagtacgatccaaaccgttcagctaacattgcactaatcaactatgtagacggagaaaaacgttacattcttgcaccaaaaggaattcaagtaggtactgaaatcatgtccggccctgaagctgacatcaaagtaggtaacgcacttccgcttatcaacatccctgttggtacagttgtgcataacattgaattaaaacctggtaaaggcggacagcttgtacgttcagctggtacatctgctcaggttcttggtaaagaaggcaaatacgttcttgtacgtcttaactctggtgaagttcgcatgatcctttctgcttgccgcgcttctatcggtcaagtaggtaacgagcagcacgaacttatcaacgttggtaaagcaggacgctctcgctggaaaggcatccgccctacagtccgcggttctgtaatgaaccctaacgatcacccgcacggtggtggtgaaggtcgcgcgccaatcggacgcaaatcaccaatgtctccttggggcaaaccgactcttggattcaagacacgtaagaaaaagaacaaatctgataaatttatcgtacgtcgtcgtaaaaataaataacggggttgtctacggttcatttcggaccgtagtgcaatcacgaagggaggttccaaaatggctcgcagcttgaaaaaaggaccatttgtcgatggacacttgatgacaaaaatcgagaaattaaatgaaacggacaagaaacaagttgtaaaaacttggtctcgccgttcaactattttcccacaatttatcggtcacactatcgcagtatatgacggacgtaaacacgtgcctgtattcatttctgaagacatggtaggccacaagttgggcgaattcgcaccgactcgtacttacaaaggccacgccagtgacgataaaaaaacaagacgctaagagaggaggcttttaaatgcaagctaaagctgttgcaagaacagtccgtattgctcctcgtaaagcacgtctagtaatggacctgattcgaggtaagcaagtaggcgaagcagtatctatcctgaacttaactccgagagctgcttctccgatcatcgaaaaagttttaaaatctgctatcgcaaatgctgagcacaactacgagatggacgctaacaatctggttatttctcaggcatttgttgacgaaggcccaacgttaaaaagattccgcccgcgtgctatgggacgtgcgagccaaatcaacaaacgtacgagccacattacaatcgttgtatcagaaaagaaggagggataagtagtgggtcaaaaggtaaatccagtcggtcttcgtatcggagtcattcgtgattgggaatctaagtggtacgctggtaaagattacgctgacttcctgcacgaagatttaaaaattcgtgaattcattagcaaacgcctttctgacgcttctgtttctaaagtagaaatcgagcgcgcagcaaaccgcgttaacattacgatccacactgctaagcctggtatggtaatcggtaaaggcggatctgaagttgaagcacttcgtaaagcccttaacagccttactggcaagcgtgtacacattaacattcttgaaatcaaaagagcagatcttgatgctcagcttgtagctgacaacatcgctcgtcaactagaaaaccgtatttctttccgccgtgcgcagaaacaacaaatccaacgcactatgcgtgctggagcacaaggtgtgaaaacaatggtttccggccgtcttggcggagctgacattgctcgttctgaatactacagtgaaggaactgttccattgcacactttacgtgctgacatcgactatgcaacatctgaagctgacacaacttacggtaagcttggtgtaaaagtctggatctatcgtggagaggttcttcctactaagaagaaaactgaggaaggaggaaaataatatgttattaccaaaacgcgttaaatatcgcagagagcatcgcggaaaaatgcgcggtcgcgctaaaggcggtactgaagtacattttggtgagtacggtatccaggctcttgaagcttcttggatcacaaaccgccaaatcgaagctgcacgtattgcgatgactcgttacatgaaacgtggcggtaaagtttggattaaaattttcccttcaaaaccttacactgctaaaccgcttgaggtacggatgggttccggtaaaggggctcctgaaggctgggtagctgttgtaaaaccgggcaaagttttatttgaaatttctggtgtgtctgaagaggtagctcgtgaagctcttcgtcttgcatctcacaaattgccaattaaaacgaagttcgtaaaacgtgaagaaattggtggtgaatcaaatgaaagctaatgaaattcgtgaccttaccactgctgaaattgaacaaaaagtaaagtctcttaaagaagaacttttcaatcttcgctttcaattagcgacaggacaacttgaaaatactgctcgcattcgtgaagtgcgcaaagctatcgcgcgcatgaaaactgtgattcgtgaaagagaaattgctgccaacaaataatcactgaggggaggtcgtgagcatgagcgaacgtaaccaacgcaaagtttaccaaggccgtgttgtttctgacaaaatggataaaaccatcactgttgttgttgaaacatacaaaaaggatcctatttacggtaaacgcgtaaaatactcaaagaaattcaaagcacatgatgaaaataaccaagctaaaatcggagacatcgtgaagatcatggaaactcgtccattatctgcaactaagcgttttcgtctagtagaagttgtcgaagaagctgttattatctaataaagttcggaattctttttccgaagggaggtaacaaataatgattcaacaagagactcgtttaaaagttgctgacaactccggtgcgcgtgaggtacttactattaaagttcttggcggttctggacgtaaaacggctaacattggtgatgtaattgtttgcacggttaaacaagcaacaccaggaggcgttgtcaaaaaaggtgaagtcgtaagagctgttatcgttcgcacaaaaagcggagcacgcagaactgacggatcatacatcagcttcgatgagaatgcatgtgttatcatccgtgacgacaagagcccgcgtggaactcgtatcttcggaccggttgcccgtgaattacgtgaaaacaacttcatgaaaattgtttctctggctccagaagttatctaatgaaataaatgccttactcaaggaggtgcgatcaggatgcatgtgaaaaaaggcgataaagtaatggttatctctggtaaagataaaggcaaacaaggtacgatccttgctgctttccctaaaaaggaccgcgttctagttgagggcgtaaacatggtgaagaagcactctaaaccaactcaagcaaaccctcaaggcggtatttctaatcaagaggcgccaattcatgtatcaaacgttatgccgctcgatcctaaaacaggtgaagtgactcgcgtaggatacaaagtggaagatggcaaaaaagttcgtgttgcaaaaaaatctgggcaagtcttagataaatagtatttaaaggaagggaggtctatctcatgaaccgccttaaagaaaagtacaataaagaaatttcacctgctttaatgacgaagttcaactacgactctgttatgcaggtgccaaaaatcgaaaaaatcgtaatcaacatgggtgtcggtgatgctgttcaaaacgcaaaagcaatcgacagtgctgttgaagaattaacgtttatcgcaggtcaaaaacctgtcgttactcgtgcgaagaaatcaattgctggattccgtcttcgtgagggaatgcctatcggtgcgaaagtaactcttcgcggagagcgcatgtatgatttccttgataaacttatttctgtatctttaccgcgtgtacgtgacttccgcgggatttctaagaaatctttcgacggtcgcggaaactacactcttggtattaaagaacagttaatcttccctgaaattgactacgataaagtaacaaaggttcgcggaatggacatcgttatcgtaacgactgctaactctgacgaagaggctcgtgagctattaactcaagtaggtatgccgttccagaaataatcaatgaaagggaggcgaaatcgtggctaaaaagtcaatgattgcgaaacaacaacgtacaccaaagtttaaagtgcaagagtacactcgctgtgaacgctgcggacgtccgcactcagtcattcgtaaatttaaactttgccgtatttgtttccgtgagcttgcatataaaggacaaattcctggcgtgaaaaaagccagctggtaatccccaagaatgggaaggaggtaattatataatggttatgacagatccaattgcagatatgctgactcgtattcgcaatgcaaacatggtacgtcatgagaagcttgaaattcctgcttctaaattgaaaagagaaattgctgacattttaaagcgtgaaggtttcattcgtgacgttgagttcgtagaagacagcaaacaaggtatcatccgcgttttcttgaaatacggacaaaacaacgagcgcgttatcactggtcttaaaagaatcagcaaaccaggtttgcgtgtatacgctaaatcaaatgaagtacctcgcgtacttaacggtcttggaatcgcgattatttctacatcacaaggtgttttaacggacaaagaagcccgtgcaaaacaagctggtggagaagttctagcatacgtttggtaagaagtttaacaagaatggaggtgttttagtatgtctcgtgtaggtaaaaaactgcttgagatcccttctggagttacagtaacgctgaacgaaggcaacactgtagctgtaaaaggaccaaaaggagaattaactcgtactttccatcctgatatggaaatcaaaattgaggacaacgtgcttacagttactcgtccttctgatcacaaagagcaccgtgcgctgcatggtacgactcgcagtctgcttggaaacatggttgaaggcgtatctaaaggatttgaaagaggtttggaattagtcggtgtcggttatcgtgcggctaaatccggaaacaaacttgttttaaacgttggatactctcaccctgttgagatcgttcctgaagagggcatcgaaatcgaagttccttctcaaactaaagtagttgtaaaaggtacagacaaagagcgtgtaggagctatcgctgctaacatccgcgctgtacgttctccagagccttacaaaggtaaaggaatccgctacgaaggtgaagttgttcgccgtaaagaaggtaaatctgctaagtaagaccgcttaaagtgaagaaaggagtgacctaaggatgattacgaaaactagcaaaaatgctgctcgtcaaaaaagacatgcccgtgttcgtgctaaactttcaggcacagctgaaagacctcgtctgaatgtgttccgttcaaacaaacacatttatgctcaaatcatcgatgatgtaaatggcgttacacttgctagtgcctctactctcgataaagatttgaacgtggaaagcactggtgacagcgctgctgctgctaaagtcggtgaactcgttgcgaaacgcgcttctgagaaaggtgtttctgacgttgtatttgaccgcggcggatacttataccatggacgtgtaaaagctctggccgatgcagctcgtgaagccggactgaaattttaataaaaaaaggagggacacatgattatgcgtcgtattgacccaagcaaattagagttagaagaacgcttagttacggttaaccgcgtagcgaaagttgttaaaggtggtcgtcgtttccgtttcgcagctctagtcgttgtcggtgacaaaaacggtcacgtaggtttcggtactggtaaagcacaagaagtacctgaagcaatccgcaaagctgttgaagatgcgaaaaagaatttgattgaagtaccaatggttggaactacgattccacacgaaatcatcggacgtttcggtgcaggcaatatcttgttgaaacctgcttctgaaggtactggagttatcgctggaggccctgtacgtgcggtacttgagcttgctggcgttgctgatatcctttctaagtctttaggttctaacacaccgatcaacatgatccgtgcaacacttcaaggtttaagtgagcttaaacgtgccgaagaggttgcgaagcttcgtggaaaatctgtagaagaactgttaggataaggagggaacattaatggctaaattagaaattaccctcaaacgcagtgtaatcggtcgcccggaagatcagcgcgttactgtaagaacacttggtttaaagaaaacaaaccaaactgtcgttcatgaagataacgctgcgatccgcggtatgattaataaagtatctcatctagtttctgttaaagaacaataaaaataaattataggctaaggaggtgtcctaatgaaacttcatgaattaaagccttcagaaggttcacgtaaagtacgcaatcgcgtaggtcgtggtattggttctggtaacggtaaaacagctggtaaaggtcacaaaggtcaaaacgctcgttctggcggcggtgtacgccctggattcgaggggggacaaatgcctttattccaacgtcttcctaaacgcggttttacaaacatcaaccgtaaggattacgctattgtgaacgtagacaaattgaacggttttgcggaaggaacggaagtcactcctgaacttcttcttgagactggtgttattagcaaacttaatgcaggagtaaagattcttggcaacggtaaattagagaaaaaattaactgtaaaagccaataaattctctgcttctgcgaaagaagctgttgaagctgctggcggtacagctgaggtgatctaacttgtttaagacaatctccaactttatgcgtgtgagtgatattcggaataaaatcatttttacattactcatgcttatcgtctttcgcataggtgcgtttatccctgtgccatatgtaaatgctcaggcgttgcagacacaaagttcgatgggggtttttgatctccttaacacatttggcggcggtgcgctttatcagttctccatttttgcgatgggaattacgccttacatcactgcttcaatcatcattcagctgcttcagatggatgttgtgccgaagtttaccgagtggtctaagcaaggtgaagtaggccgccgtaaattagctcagttcacgagatattttacaattgtgcttggttttatccaggcattaggtatgtcttacgggtttaacaacctggcaaacggtatgctgattgaaaaatccggcatatcgacatatctgattattgctttagtactcactggaggaactgcttttttaatgtggctgggcgaacaaattacttccaatggagtaggtaacggaatttcgatcatcatcttcgcggggattgtggctagtattccgaaaactgttgggcagatttatgagactcaatttgtcggcagcagcgatcagctgtttattcatattgtaaaaatcgctttactggtgattgcgattttggccgttattgttggtgttattttcattcagcaggccgtacgcaaaatcgcgattcaatatgcaaaagggcaaggtcgttcacctgttggcggaggccagtcaactcaccttccgcttaaagtgaatccggcaggggttattccggtaatctttgcggttgcgtttcttattacgccgcgtactatcgcgtcatttttcggagagaacgatgtgacaaagtggattcaagccaactttgacaatacacatccggtgggcatggcggtttatgtcgcattaattatcgcctttacgtacttctatgcttttgtgcaggtaaaccctgaacaaatggctgataaccttaaaaaacagggtggctatatcccgggggttcgtccagggaaaatgactcaagatagaattacgagcattttgtatcgacttacgtttgtgggttctatattcttagccgtgatttccattcttcctatctttttcattcaattcgctggattgcctcaaagtgcacagattggcggaacatcattgttaattgtcgtcggggtagccttggagacaatgaagcagctggagagccagttagtgaaacgtaattaccgaggatttatgaaaaattagaggactggttttaaccattcctctaaataagagaggacgggggaaatccgaatgaacttagtcttaatgggacttcctggagccggtaaaggcacacagggagaacgaattgttgaggattatgggatacctcatatctcaacgggagatatgttccgtgctgctatgaaagaagaaacaccactcggactcgaagcaaagtcttatattgataaaggcgagctcgtaccggacgaagtcacaatcggcattgtcaaagaaagactaggcaaagatgattgtgaaagaggttttcttctggacggatttccgcgaacagtcgctcaggctgaagctcttgaaaacattcttgaggaatacggcaagccgattgattatgtcattaacattaaagtagacaaagactctttaatggaacgtttgactggacgcagaatttgcagtgtttgcggcacaacctatcatttggttttcaatccgccgaaaacgccgggtgtttgtgataaagacggaggagacctttatcaacgggcagatgataatgaggaaaccgtctcaaaacggcttgaggtcaacatgaagcagactcagcctttactcgatttttattctgagaaagggtatcttgtcaacgtcaatggccagcaggacattaacgacgtgtacaaagatgtgaaagagcttcttggaggattgagcaaatgattatctgtaagacccctcgtgagcttggcatcatgcgggaagcagggcgaatcgtggctttgactcatgaagagatgaaaaagcacattaaaccaggaatctcgacaaaagaattggatcaaattgccgaacgttttattgagaagcagggtgcaatcccatcttttaaggggtataatgggtttcgcgggagcatctgtgtatcagttaatgaagaactcgttcacggaatacccggtaaaagggttttacgtgacggtgacattatcagcattgatatcggtgctaaattaaatggttatcatggtgactctgcttggacatatccggtaggaaacatcagtgatgatgataaacgactgctggaagtaacagaggagtctttatataaaggcttgaaggaagcaaaaccaggtgaacgtttgtcgaatatttcccacgcaatacaaacgtatgtcgaaaatgagcagttttcagttgttagggagtatgtcggacatggtgttggtcaagacttgcatgaggatccgcaaattcctcattacggtccgccaaacaaaggacctaggctgaagcctggtatggttctcgctatagaaccgatggttaacgctggcagccgatatgtgaaaacattggctgataactggacggttgtaacggtagatgggaaaaagtgtgctcattttgaacatacgattgcgattacggaaacgggttttgatatactgacaaaagtctagatgatgaaatgaattccttgacacatgttttcattccgcacctgggcagattgtaggtttacaattggtcggaagaaaaacaggctagctgctgtcatcggaatgaagattcatcatcgtgtactaaagcagacggagaaaagcgtacatttcattctccttagaaaaagaatatcaatcattcaccctttatgattgcgtatctccggaagttcagaacagtataaacgaaacagggcgtgtgacaaacggataactgagattttctcttttgaaatttgtcagagagcaagttactgatttgaagaagggagaacacttgaatggcgaaagacgatgtaattgaagtggaaggtacgattgtcgaaacactgccaaacgcgatgttcaaagttgaactcgaaaatggccatacggttttggctcacgtatctggtaaaatccgcatgcacttcattcgcattttacctggagacaaagttacggtagaattatctccatatgacttaactcgtggcaggattacgtaccgttacaaataaagcactccggaaactgaaggaggttggaaacacatgaaagtgagaccatcagttaaaccaatctgcgagaaatgtaaagttattcgcagaaaaggaaaagtaatggtgatctgtgaaaatccaaagcataaacaaaaacaaggataattaataaggaggtgcccagagaatggctcgtattgctggtgtagatatcccacgtgacaaacgtgttgttatttctttaacatatgtcttcggaattggccgcacaacggctcagcaagtcttgaaagaggctggtgtttctgaagatactcgtgtgcgtgatcttactgaagaagaacttggtaaaatccgtgatgttattgacaaactgaaagtagaaggtgaccttcgccgtgaagtttctcttaacatcaagcgtctgatcgaaatcggaagctaccgcggaatccgccatcgcagaggtttgcctgttcgcggacaaaactctaaaaacaatgcgcgtactcgtaaaggtccgcgtcgtactgtagctaacaagaaaaaataagtaagggaggtacctaaacaatggctgctgctcgtaaacaaaacacgcgtaaacgtcgcgtgaaaaagaatattgagtcaggaatcgctcatattcgttcaactttcaacaacacgatcgttacgatcactgatactcatggtaatgctctttcttggtcaagtgccggagctctaggattcagaggttctcgtaaatctactccttttgctgcgcaaatggctgctgaaacagctgctaaaggttcaatcgaacacggacttaaaactcttgaagtaactgttaaaggaccaggttctggccgtgaagctgcaatccgtgctttacaagctgccggacttgaagttacagctatcagagacgtaactcctgttcctcataatggatgccgtccaccaaaacgtcgccgcgtgtaatttgtttgtatagattttgtgtccctgtcaataatgggttatgatacagttatttatgaaacgaatgcaccgactcgttgcctgagcacatacgggactaaacaatggggaatttcggatggaatctcatatgattctattcgaggtttcgacgttttgaaggagggttttaagtaatgatcgagattgaaaaaccaaaaatcgaaacggttgaaatcagcgacgatgccaaatttggtaagtttgtcgtagagccgcttgagcgtggatatggtacaactctgggtaactccttacgtcgtatcctcttatcctcactccctggtgccgctgtaacatcgatccagatagatggtgtactgcacgaattctcgacaatcgaaggcgttgtggaagatgttacaacgataatcttgcacattaaaaagcttgcattgaaaatctactctgatgaagagaagacgcttgaaattgatgtacagggcgaaggaactgtcacagcagctgatattacacacgacagcgatgttgaaatccttaatccggatcttcatatcgcgactcttggtgagaatgcgagtttccgagttcgccttactgcacaaagaggacgtgggtatacacctgctgattcgaacaaaagagacgatcagccaatcggcgtgattccgatcgattcaatctttacgccagtttctcgtttatcttatcaggtagaaaacactcgtgtaggccaggttgcaaactatgacaaacttacacttgatgtttggactgacggaagcactggaccgaaggaagcaattgctctcggttcaaagattttaactgaacaccttaatatattcgtcggtttaactgacgaagctcagcatgctgaaatcatggttgaaaaagaagaggatcaaaaagaaaaagttcttgaaatgacgattgaggaacttgacctttctgtccgttcttacaactgcttgaagcgtgcgggcattaacacggttcaagaacttgcgaacaagacggaagaagatatgatgaaagttcgcaacctgggacgcaaatcacttgaagaagtgaaagcgaaactagaagaacttggactcggccttcgcaaagacgattgatctagtttccatgtgaactaggattttcgtgtgttttttatttagaaacagcattccattaaaggaggggacatcacatgtcatacagaaaactaggacgtacgagttcacagcgtaaagctatgcttcgtgatcttacaacagatttgatcatcaacgaaagaattgaaacaactgaaacacgtgcgaaagaacttcgctctgttgttgaaaagatgatcactcttggtaagcgcggtgacttgcatgctcgtcgtcaagcagctgcatacattcgcaacgaggttgctaatgaagaaaataaccaagatgcacttcaaaaattattctctgacattgcaactcgttacgaggagcgccaaggcggatacacacgtattatgaagcttggtcctcgccgtggtgacggtgcaccaatggcaatcatcgaattggtttaatcacatatttttgtgtatctaaagaagggcgggacagtttctaactggatctatgccctttttttagatatcagaactttttatcatgagacagaaaagcagagctatagctgagaggaggtcaggcgcccgtggatcaaaaacagcttatatccgtaaaagacattctattccgctaccgcaaagatgcagaaagaccggcgctggacggtgtgagtctggaggtatacgaaggagaatggcttgctatcgtaggccacaacggttcagggaagtcgactttggccagagcgctgaacggactgattttgcccgaggccggagaaattgaagtcggcggcatcaaactgactgaggataccgtgtgggatgtgcgaaaaaaaatagggatggtctttcagaatcccgataaccaatttgtcggaacgactgttcgcgatgatgtggcttttggtttagaaaacaatggtgttccgcgcgaagaaatgattgagagagtagattgggctgtcacacaagtcaatatgcaggattttcttgatcaagagccgcaccatctctccggaggtcaaaaacaaagagtggcgatcgcgggaattattgccgcgcgtcctgatattatgattttggatgaagcgacatccatgcttgacccgattgggagagaagaagtccttgatactgtcagacgcttaaaagatcagggcatggccaccgtcatttcgataacacatgacctggaagaagccgcaagggcggacaggatcattgtgatgaacggcggcaggaaatatgcagagggcacgcctgaagagatttttaaattaaacgaagacttggttcgcatcggtcttgatttgcctttctcattccagctcagcctgcttttgaaagaaagcggactggcgttaacgaaaaaccatctgactcaggaagggctggtgaatgagctgtggacattaaaatcaaagatgtagaacaccgctatcaaatgaagacaccgtttgaacggctggctctgtatgatatcaatgccgtgataaaagagggcagctacgttgccgtcatcgggcatacagggtcgggcaaatcgacgctcctgcagcatttaaacgggttgctgaaaccgactaaaggacagcttgaactcgggagcacgattctggcagccggtaaaaagaataaagatcttaagactttgcgaaaaaaagtcggaatcgttttccaatttcccgaacatcagctgtttgaagagactgtgctgaaggacatcgcattcggaccgatgaattttggtgtaaaaaaagaagacgctgaacggaaagcaaaagaaatgctgggacttgtgggccttccggaagacattttggatcgttcaccatttgagctcagcggcggccagatgcgcagagtggcgattgccggcgttctcgcgatggagccggaagtgctggttttggatgaaccgacggccggtcttgatccgagagggcgtcaggacattatggacatgttctatgcgcttcatcagcggggaaacctgactaccgttctcgtcacccacagcatggaggacgccgcccgttatgccgacgaaatgatcgtcatgcacaaagggaccattaaagcgacggggagtccgcgtgacttgtttgtaaaaggtgaagagatggccgaaatgggactggatcttcctgaatcggtgaagtttcagagacggcttgaggaggctctcggagtcaagtatgaaaaacccatgctgaccctgcaggatgccgccagtgaaatcaaggctttctttcaggaggaaaaggaccaatgatggacagcatgattatcggaaagtatgttcccggatcatcgcttattcaccgattggacccgcgaacaaaacttgtcagcatctttctttttgtatgtatcgtttttttggcaaacaacgtacagacgtacgctttgctcggtttgtttacattcggggtgatcgccttgactcgcgtgccgttcagctttttgctgaaggggcttaagccgattatctggattgtggcgtttacctttttattacacattttcatgacgcatgaaggatctgtcatttttcagcttggctggtttaaagtgtatgagggcggacttatacaggggatttttatctccctccgtttcgtttaccttatctttatgacgacgctgctgacgctgacaacaacgccgattgaaataacggatggaatggagcagctcctgaatccttttaaaaaggtgaagctgcccgtacacgaactcgcattgatgatgtcgatatcattgcgatttatcccgacattgatggaagagacagataaaatcatgaaggcgcaaatggcgaggggtgcggactttacaagcggcccggtgaaagacagaatcaaagcggttgttccgctgcttgtcccgctgtttgtcagcgcctttaaacgtgcggaagagcttgcggtcgccatggaggcgagaggctaccggggcggtgaggggagaacgaaatacagaaagctcgtctggaccggaaaggataccggagccattctgctcatcatcgtattagccgtgttattgtttttcttaagaagttagaggtgctgctgaatgagagtgaaatgtaccattgcttatgacgggcatttatttaacggatatcaggttcagcctggaaagcggaccgttcaaagtgaattggaaaaagcgctggccgtcatccataaaacggacggcagagtgcctgtgtactcatccggccgcacggacagcgatgttcatgctgccgggcaggtcattcattttgatacaccgctgtccatcccggctgagaaatggccgtttgcgctcaatgccctgctgcctgatgatattgccgtcaaaacagcagagattgcggatgatgggttccatgcacgatttagcgcggtccaaaaggaatatcgctactttgtatatacggagaaacacccggacgtatttaaacgacattacgcttaccattttgcatatccgcttaatgtgcagaaaatgagggaagcttcaaggcacctcgtcgggacacatgatttcacaagcttttgcgcggctgataccgcggttcaggataaagtcagaacgatttacgagctggattggactgagaccggagacggcctgcagatgcggatcaccggaaacggttttctctataatatggtcagaatcattgccggaacgttattggatacaggagctggaaaattttctcccgatgatgtaaaagcaatgctcgaagcgaaggatcgcgaagccgcggggcgcaccgcaccggggcacgggctgtatttatggagcgtttgctatgacaactaaaccaggtgtaacattttcttgacagagtctgcataaagttataagatatcatatggtatgtatttcaaccccacgataagccccggaacttattgtgttgtgaaatagaacgtaatcgaagattattgaaaatgacagattatttaggagggaaattcaatgcgtacaacacctatggctaacgcaagtactattgaacgcaagtggttagttgttgatgcagcaggcaagactttaggacgtctttctacagaagttgcatctatccttcgcgggaaacacaaaccgacttacacaccgcacgttgatactggagatcatgtgatcatcatcaacgctgaaaaaatcgagttaactggtaaaaagttaactgacaaaatctactaccgtcacactcaacatccaggcggattaaaatcaagaactgctcttgaaatgcgtacaaactaccctgagaaaatgcttgagcttgctatcaaaggcatgcttccaaaaggttctctaggtcgtcaaatgttcaagaaattgaacgtataccgtggttctgagcatccacatgaagcacaaaaacctgaagtttacgaacttcgcggttaattaaaaaggaggttaccaatttggcacaggttcaatattacggtactggccgtcgtaaaagttctgtagcgcgtgtgcgcttagttccaggtgaaggtcgtatcgtcgttaataatcgtgaaatcagcgagcacattccatctccagctctaatcgaagatatcaaacaaccattaactttaactgaaacagctggtacttatgatgttttagtaaacgtacatggaggcggcttatctggtcaagctggagcaatccgtcatggtatcgctcgtgctttgcttgaagcagatccagaataccgtgcaacacttaaacgtgctggtcttctgactcgtgacgctcgtatgaaagaacgtaaaaaatacggtcttaaaggcgctcgtcgtgcacctcagttctcaaaacgttaatcgttttggatggcaaaaaccacaacttcttggttgtggtttttttgtatttttttctcatattcaagaggttatccgatgtttttctagaattgtttgttatactctattcattaccaataaggagcgcagttataatgaataagttagtcatacataacagcaaggcatgggataaaaaagtcgaaacaggcaatgaatggacggttgcggttgattcccatacgattggtgaagcgaaaaaaggcaattggagcatcagaatgacccccggaaaagatgtgccggcggattggtttccgcccataggcggtctgaaggttctttgtctcgcttcaggaggaggacagcaagggccggttcttgctgctgcaggagcggacgtgaccatctttgacaattcggaaaaacagcttgcgcaagacagaatggttgccgagcgggacgatcttacgctgcggactgtcaaaggcagcatgaatgatctgagctgttttgatgatgagtcatttgattttatcgtgcacccggtatcgaattgctttgttgatacggttcttccggtatggaaagaagctcatcgcgtattgaaaaaaggcgggtctttagtctccggttttgtaaatcccgtcgtgttcttatttgatatggatttagagcaggaaggcgtactaaaagtaaagtattccattccgttttcggatgaaaaagatctgagtaagaaaaaggtaaaggaacttattgataatcatgaagcgcttgaattcggtcatacgctggaggatcaaattaaaggtcagattgacgcaggcttcatggttgccggtttttacgaagacaaaggcggcctcgtgctggatgaatacattaatacatactccgtaacaagaagcattaaaatataaaaacggcatcccgtcagaggtgctgtttttttgcggctttttcctgcggacggctgatcacattagccgaaaccggttctattccaatttctctggcccaaaccgacagttgtcccatatggtgaatctcatgcgcaaggatgtggcggagaatatcttctttaggaaaggtttggtccatccattccggcttaacaagatccggtcctttgcgggagaccgcatgaatgacatccttccgatattgttcagacagctttctgagatcctgaatgctcgtatagtcagactcagcaggtaaaacatcatctttacctaaaatggcacgagcccagctgatctcgacatcaatgatatgaaataaagtgcgcaagatgctcttcattccgcccgtccgggttttcgtcagttcctcccggctcagcttttcacatatcataaaccactcgtcacgcaccgtccaattgtattgaaacagctttttcataacgtcacctcagctctttcttcttccagttaacataaaactccttcatttgggaggatttccactatcaacaaagcatgctttttcccttttcctttcaaaataacagtaaaaaggagcgtggctggcaatggcagaagtattatctttttcagacgtgaaacgccagaaggattttgagcttgagaagagtttactaaaggagctgtcactgacgcagatcattcagtccgtaaaagcatgtcttacgcctttgtttccctttcttcaagacgaaaacggcattctgagtgaaggatgcatagattttgcaattgaagcgtatttattaggcggccggttcggcgtctttggctattatggtgagtccttgcagagggcaaacgcccgttcggcagaagaagaggaagaactgacggtcgatttttttgaatatctttgcaattggacgcatgagcaatattcttccgttgaacaaaaagaaatctatgaagcgtcctgccggtttatcaacagctggtggacggaaggatttctgcaaagagaaaaacaatgtaagctccgcatgaggtaatcataatttcttcccttgtcccatacttattaataacggggacaagcgggagggaaaggtatgacaaaaaagctgaaatggctcggttttttacttggctttatcatattattgtgtttattccggtttcaattccataatgatgattcctggcggccgtggagtctgccgctgagcgggaaaatcatctatctcgatccgggacacggcgggccggacggaggcgccacgggaggcagtcaccttgaaaaggacattactctcgaagtggcctccagggtcagagactatttgcaggagcagggagctttggtcattatgacgcgggagacggatactgatttagctcctgaagggacgaaaggctacagcagacgcaaagcggaagatctgagaaagcgcgtggaaatcatcaaccgttcagaggcggagctttatatcagcattcatctgaacgccataccgtcaccgagatggagcggcgcccaaagcttctactatggaaaatacgaagagaatgaaaaagtggcaaaatatatacaggacgaattgagaatcaatttggagaatacaacgagaaaggcgaaacggatacacggcatttacttaatgcagaatgtaaccaaaccgggcgcgctggtggagatcggatttctgtccaatcccgcggaagcgaaaaggctcggccagcccaaatatcaggacaaaatcgcttcttccgtgtataagggcgtattgagatacttcacagagaaaggagaccctcccgagtaaggagggtttttcgccgattctatgtttaatatatggtataataccatttgtaaacgaatacacaaagggtgagggttcgatgataagagaagatgaagtaagaaatatagtcggaaacatgcgcgaaccttttcttcatagaccgctgggagaattggatgccattaaagaagtaaagatcaagccggaaaaacggcatgtcagtgtgaaaattgcattggcaaaaacggggacggctgaacagatgggtattcagcaggaaatcgtatccgttctgaaagaagcgggtgcggaaactgtgggactgcggtttgaagagctgccggaagaaacattggagaaattcagccggccggctgctgaaagcgaaaccctgctgaataggaaacatccgccggtctttcttgcggtggcaagcggaaaaggcggtgtcggcaaatcaacggtttccgtcaacctggccatttctcttgcgcggctcggaaaaaaagtcggcttgatcgacgcggatatatacgggttcagcgtgccggacatgatgggtattacagtccgcccgacagtagaaggagaaaaactgcttcctgtcgaaagatttggagtaaaggttatgtcgatgggctttttcgtcgaagaaaacgctccggttgtgtggagagggccgatgctgggcaagatgctgaataacttcttccatgaagttgactggggagaggttgactatatcgttcttgatctgccgcccggcacgggtgatgtggcgctcgatgtacacacgatgcttccgagctgcaaagagattatcgtatcaacgccgcaccctacagctgcatttgtagcggcgagagcgggttctatggcgattaagaccgatcatgaagttgtaggggtcattgaaaatatggcttactatgaaagtgcaaaaaccggcgagagagaatttgtgttcggtcaaggcgggggagataagctttcagaggaattgcaagtgccgctgcttggcagaattcctttaaagcagcctgattgggacaaggatcagttcgcgccttctgtctatgacagaagtcatccgatcggggaaatttatatggggatcgcccagaaagtcattgaaaaaacagctgaataaaaaaggggccgggatcaacacggcccggccttttattggctttctttttcagagcttgaagctgcttttttcaattcatcctcgaattgctttttgaaaagcgggctggaaagtgtctctgtaattacatcttctaagtaactgcggaacttttggcttttcaccagctcatagtattttttatccatgccggggtcctgcatgatctgcataaaacttttctgataatcagggtctttcatcagtttttttatgattttttcgtgctcgggctgaagagtttttgcaaagctctcggcgaattttgagtcttcaaagatggttttccagaactccgccccttttttagaggtgagggttttctctattgtgcctttaatggcattttgatcaatcaccaatgcctcattcatcgcatcatcatttaatatttccttaattgccttttttccatcatcggtctttaatatatcaacaaccatttttttagtctggtcataatccatatccgctgcttggtcttttggagcacaagctgttacagataataaaacaaaacagcttatcaatagcgttttggcttttgacatgcataagctccttccttacttgtacttatttttaatatgattcatcggaatggatttatacataacaaaatatcgctgaacgcgattgtcagggggatgaataagagatgaaaagccgcgggcttgttcgatttttcttttcgattttagctgtgggcgctcttattacaagcgtcgtgggatttgctctgaagtggggggagtacaaggggttctttctgaattttgaggccggtcagattttctccgttctgatctggtttatcggggtaggcatgattttcagtgtgatcagccagatgggattcttcgtttttttgacggtgcaccggtttgcccttgaaattctcagatcaagctcgctttggaatctgcttcagctgtttatcattttgtttgtcgcttttgatttaatgtacgtcagatttttgtttttcggggagcgggatgactcgattgcagggtttgtctggctgccgctggctctgcttgccgtcggcctgttgacggcatatataaaacaaaagcagtcctcaaaaaatacgttcgtttcatcattatttttaatggtcgttattacagcgcttgaatgggttcctgcgctacgagtgaataatgaggactggctttatttgatgctgattccgctgatgggctgcaatgcgtttcagctgctaatgctgccgaagtttgcccagaggtaattatttcacttctgatgacttgacgtcagtatttgcgatcaggtcgccgacggtcacgtttttcagtcctttttgctttaaattgtgaatgatggcggggagggcttcttcagtctgtgttgctgaatcagaggcgtgcagcagaacaatgtcgccgccttttatatgactgtttacattttcaatgattttatcagggccgggatttgtccaatcctgcgagttaacgctgtaatgaaccactgaatagtggtactgctgtgcaatggtaagaacctttttattaaattgtccggtcggcgggcggagtaaatgaacattcttcacacccagctttttaaatgcagtctgggcccggaggatatctttttttatttcattgtcctctaggttggtataattcttatacgcatatcccatgctgccgatttgatgtccgtcttttatcatacgttcaactgtgtccgggtgccgttccgcccaagaagctgacagaaaaaaagtggcgtttttaataccgtttgcttttagcgcgttcagaatcggaaccgccttttcatcgccccagctgatatcgaatgttaatgcgacttcgcccgctttcgtctccccttttgaaatagccttcgggccgctatcagttaaaaatacaggaagggggactgctctctgtatataaaaaaagctggctgctgcaaatgcggcaatgataataataagcagctgttttattcttctgatgtgccacacgtagaagtgattcactgatgacgcctccttatcttgtccatgcttgattacatcgtatgccgcggcggagatgaatataacgaaatacgttttaaaaaaatgaaaaaaacacttgctaaattcatcgaatgcatggtatattattaaacgtcgctgatgaacagcagacaacaacaaaaagcttcggaaacaacttaaaaaaagttgttgacataaaagaagctgagtggtaagataataaagctgcttcaacaagcggtaatgatctttgaaaactaaacaagacaaaacgtacctgttaattcaaagttttaaataaatcgcacagcgatgtgcgtagtcagtcaaactaaggtctgcacgatgcagatcacacagacgttactgcaggatgcagtgaacttagtctgtgatccatttatcggagagtttgatcctggctcaggacgaacgctggcggcgtgcctaatacatgcaagtcgagcggacagatgggagcttgctccctgatgttagcggcggacgggtgagtaacacgtgggtaacctgcctgtaagactgggataactccgggaaaccggggctaataccggatggttgtctgaaccgcatggttcagacataaaaggtggcttcggctaccacttacagatggacccgcggcgcattagctagttggtgaggtaacggctcaccaaggcgacgatgcgtagccgacctgagagggtgatcggccacactgggactgagacacggcccagactcctacgggaggcagcagtagggaatcttccgcaatggacgaaagtctgacggagcaacgccgcgtgagtgatgaaggttttcggatcgtaaagctctgttgttagggaagaacaagtgccgttcaaatagggcggcaccttgacggtacctaaccagaaagccacggctaactacgtgccagcagccgcggtaatacgtaggtggcaagcgttgtccggaattattgggcgtaaagggctcgcaggcggtttcttaagtctgatgtgaaagcccccggctcaaccggggagggtcattggaaactggggaacttgagtgcagaagaggagagtggaattccacgtgtagcggtgaaatgcgtagagatgtggaggaacaccagtggcgaaggcgactctctggtctgtaactgacgctgaggagcgaaagcgtggggagcgaacaggattagataccctggtagtccacgccgtaaacgatgagtgctaagtgttagggggtttccgccccttagtgctgcagctaacgcattaagcactccgcctggggagtacggtcgcaagactgaaactcaaaggaattgacgggggcccgcacaagcggtggagcatgtggtttaattcgaagcaacgcgaagaaccttaccaggtcttgacatcctctgacaatcctagagataggacgtccccttcgggggcagagtgacaggtggtgcatggttgtcgtcagctcgtgtcgtgagatgttgggttaagtcccgcaacgagcgcaacccttgatcttagttgccagcattcagttgggcactctaaggtgactgccggtgacaaaccggaggaaggtggggatgacgtcaaatcatcatgccccttatgacctgggctacacacgtgctacaatggacagaacaaagggcagcgaaaccgcgaggttaagccaatcccacaaatctgttctcagttcggatcgcagtctgcaactcgactgcgtgaagctggaatcgctagtaatcgcggatcagcatgccgcggtgaatacgttcccgggccttgtacacaccgcccgtcacaccacgagagtttgtaacacccgaagtcggtgaggtaacctttatggagccagccgccgaaggtgggacagatgattggggtgaagtcgtaacaaggtagccg

SEQ ID NO: 9 - DNA, 56766 bp, Bacillus subtilis
ggtaagttccgacccgcacgaaaggcgcaacgatctgggcactgtctcaacgagagactcggtgaaattatagtacctgtgaagatgcaggttacccgcgacaggacggaaagaccccgtggagctttactgcagcctgatattgaatgttggtacagcttgtacaggataggtaggagccttggaaaccggagcgccagcttcggtggaggcatcggtgggatactaccctggctgtattgaccttctaacccgccgcccttatcgggcggggagacagtgtcaggtgggcagtttgactggggcggtcgcctcctaaaaggtaacggaggcgcccaaaggttccctcagaatggttggaaatcattcgcagagtgtaaaggcacaagggagcttgactgcgagacctacaagtcgagcagggacgaaagtcgggcttagtgatccggtggttccgcatggaagggccatcgctcaacggataaaagctaccccggggataacaggcttatctcccccaagagtccacatcgacggggaggtttggcacctcgatgtcggctcatcgcatcctggggctgtagtcggtcccaagggttgggctgttcgcccattaaagcggtacgcgagctgggttcagaacgtcgtgagacagttcggtccctatccgtcgcgggcgcaggaaatttgagaggagctgtccttagtacgagaggaccgggatggacgcaccgctggtgtaccagttgttctgccaagggcatcgctgggtagctatgtgcggacgggataagtgctgaaagcatctaagcatgaagcccccctcaagatgagatttcccattccgcaaggaagtaagatccctgaaagatgatcaggttgataggtctgaggtggaagtgtggcgacacatggagctgacagatactaatcgatcgaggacttaaccaatttgaatgtatgcttactgttatctagttttgagagaacactctcaatggtttggtggcgatagcgaagaggtcacacccgttcccatgccgaacacggaagttaagctcttcagcgccgatggtagtcggggggttccccctgtgagagtaggacgccgccaagcttttcttaacccagttcatgatgaactgggttttttatatgaaagatcacatagatatataaagctaatgcctttcaaaggcattagcttttttgtttacattgattttgctttgcttttgactttattgtctcgagcattcttaaactgaacacaatcagcagcataaggagcatcagtgcagtaaacagccagaacgcagtttgtgcgggatattcatctaagctccagccgacggcgatcggaaggagtgaacctcctaatccgtttgaagcgagcagaatactggtagttgtttctgtctttccgggataaaaatgatttgtgatgattagggctattgcaaacatgcctgccatgaacagccctaaaaagaagcaaagggcaaaaccgaaccatacgtttttgcttaatgctaatacagtaagtgcagccagaccgccaatacttatgagacggagataacggtgatatgtcagcttttctgataccgggcctgttaatgacctacctatgatcatccccgtccaatacactgtaactgttatcgttgccaaagagttggggatatcccatttctcagcgaaaatggaggggataaaatgtacaatggaaacttcactgccgccgtaaaagaagaagtaagcacccgccaaggcaataaacagcaatccgtgtgaccgataaccggtgctttcttttttagtgtcatcggaagagacctctttgcggatgagaagctgatcaatactgccgaaactcatctgcctccatgcgattaagagtgcaaaactggataaccctaatactaaaaaagcaattgtccacatgtggttgttgataagaaagcctgagagcagaggcatgaacagcgcacctaatccgtaggccacttccatcttgctcatggccacagcctgtctttctttaatagcggtgaggatgatcgtgcctacacaggattccaccaatccggcgccaagccctgcgatgctgacgagaagaaagagcagcggccagggcggcaggaaggtgatgaacatttcacagctgatgagtgccaggccaaagataacgacgtttttgcgcccaagctttttcaccatgtaaggcattccgatgacaccgatgagaaagcccatgaactgagagaatactaatacaccgccattactgtagctttgtgaataatgtgtgagtaactcaggcagtacggctcccagaataacaagtgtaaaagcaatcgatccataagaaaaacagcttatccacagcagacgagttttcatcattttatctccttatttcgtatttctctctactcgtatgacatgatgtttttacaaaaaatccaagtattgttactatatcacataactttttctcgtacatccattatggtaacgttaacaaattgttaacattttttacaagaaagatcgttgacattattttcaataatttatacgataaaaagcgaaattctaataatttcataggggtggtatttgtgggaacgaaggaaatcacgaatccagacagcttgtattacagtgttgacgatgtagtaatggagcgcggagaagggatttacctgtacgatcaagagggaaatgagtacattgattgcgcctctgccacgtttaacttgaatttaggatacggtaacaaagaggtcattgatacggttaaagaacaagccgataagctcatccatgtaacatcatcttttcaaacagacgccgtaaataagctggcagaaaaactagtagaaatcgcccccgataatctcacaaaagtacaccctaaagtcagcagcggttccggtgcaaatgaaggagctattaaaatggctcagtattactccggaaaaaccgatgtcatctccttatttcgaagccacctcggacaaacgtatatgacttccgctttgtccggcaactcattcagaaaagaacctttcccgccgcaaatttcttttggcctgcaagtccccgatccctattgcagccgctgtttttataatcagaaacctgattcatgcggtatgctgtgcgtagaaagaattaatgattttattgagtatgcgagcaatggaaaaattgccgccatgattattgaaccgatatccggaaacggtggaaacgtcgttccgcctaaagagtattttaaacagctgagaaagctttgtgatgaacatgatatcgctctgatttttgatgaaattcagaccgggttcggacggacgggtaaaatgtttgccgcggaccacttcgatgtgaaacctaatatgatgacggtagcaaaagggctcgggggcacaggctttcaagtcgccgccactctgacggaggacaagtataccgggcttccggggtatacgcactccttcacatacggctcaaatgtgatggccgccgctgccgcttgtaaaaccatagatatcatgcagcgtccgggatttttggaaaatgtaacgacggtcggtcattatattatggatcgcttagaaacgatgaaagaggatttcgcttttatttctgaggtaagaggcgtcggtcttatgatcggtgtggagattgtgaaagagaacaatgaaccggatgtggacctgaccaattatattgctaaacgggcaatggattacgggctgattctccggacatcccgttacggattcggaaatgtatttaaaatccgtccgcctttaaccataacacttagtgaagccgaagtgctctgctacagacttcgcaagctattggaggaaatcaagtgagagactatatcattgagcttggacaatttgtttatcaaaaggtgaaaaatcaaaaaggcacgctgaaaaaccggctcgtaaacggctattctccgggaggcgacgcccaatttaacatagacgccaatgctgaggaggcggtgctggattatattcaagaaaagggccatccggttgctttttacacggaggatggcggcctgaagctgattggagaagatccgcaatatattttaattgtagatccgatagacggaacgcgcccggccgccgcgggacttgaaatgtcgtgtatttcgattgcgcttgcttcgtataagccaaacgcaaagattaaggatatcgaatttgcttttttgcttgaattgaaatcaggcgcttatatgtacggtgatatatacagcgatgccattcattttgaagggtatcatggagaattgccgaatttgagcgaagtgcgggatattaaaaatatgttttggagccttgaatttaacgggcatccggcgcagctgatgacggacgcatacggccatctgattgaccagtcggccaataatggcggggtttttgttttcaacagcgcttcttattcgatttcacgaattattacggggcagatggatgcttatgtggatatcggcaatcgtctgctgaaagatgatccgaagctgctttcagattttcagcaggtcgggaacgggcaggtgctgcatttgtttccttatgatattgccgcaagcgtctttttggcgaagaaggcgggagtggtcattacggatgcgtacggccggtctttggacgaaacgcttctgacagatttaagttatcagaatcagcaatcatgtattgcggcttcaacgaaggagcttcatcaaacattgttagaccaaatccgctggggcagaaaggaagagaaatatgaaggcgttggtctggactcctaatgataagcttgaatatcaagaggtggacgagcctcaaattcggaaatccaatgatgtgaaagtgaaaattttcggtaccggtatctgcggaacggacttaaatgtgctgaaaggaaaaatgaatgcaacccatcatatgattatggggcatgaatcggtgggagcggtcgtggaaatcggaccggacgtgacaaatgtaaaagtcggagaccgcgtcgtgatagatcctacgcagttttgcgggaaatgtcattattgccggagagggctgacgtgttattgcgaaaccttcgaggattggcagctcggaatcggggcgcacggaacgtttgcggaatattacgtgggggaagacaggttcatgtacagaattccggattcaatggaatgggagcgggccacattggttgagcctctctcttgtgtgctgaatgttgtggacaaggcttcgattcagccggaggactcggtcttggttttggggtcgggaccgatcggactgcttgtgcaaatgatggtgaaaaaactggcgcgattgacggttgcgactgaaataggcagtttccgaagcgaggcggcaagccggatatctgattatgtctaccaccctgaagcattaaccgtggatgaagtgaaacggattaatcaaggaagaaaatttgatgtgatttttgacgcgatcggcaaccagcttgattgggcttatccttttattgaaaagggaggcagaatcgtgccgatgggctttgatgatacgtatgagatgacgatcaggccgtaccagctgctgtcaaacggcgtaacgattgtgggcacaggtgaagcccgccagatcatggaagccgcgttagcatgcgcgtccgaccttccgcagctctatgattttattacggaaaagacggaactgaagaattatgaagaagccattgatcatctcatgggcatcgacccggtgacaaaagaaagaaaggatatcagcgcaataaaaacgattcttgtgtctgatccggaacttttataaaagcggaaacggctccagtgagggccgttttcttttcttatttatacggcttgcacatttctttaaagtttaatatgatactctttgttaacaattcctttcctcaacgacattatactctgagcgtgtcctcttttccccgtaagcttgcctcatattccccagataaaatcaatgtttccaactgatagggtgcggatttttatagtgaaaaggagtcgttatcatttgaaagattatacgttacagcagcaatggttcgggaatgtccgtaaagacattctggccggtattctggttgctctcgctctgatccctgaggcgatcggattttcaattattgcaggtgtcgatccgatggtcggcctttatgcatcattttgtatcgcgattattatttctatcttcggcggcagaccgggaatgatttcagccgctacgggttcaatggcggttgtcatggtgacattggtggctgattacgggctgcagtatttgtttgcggcaaccattttgacaggtattattcaatttattcttggtgtcagtaagatagcgaaattgatgaaatttattccgcgttcggtcatgatcggatttgtgaatgctttggcgatcttgattttttctgcgcagctgccgcagttcaaaggagcttcatgggtcatgtatgccatgcttgccggatcactggctatcatatatctattgccgaaggttacgacggctgtgccgtctccgctggtggcgattattgtcatgacgatcattgcggtggtcttccatgcggatgtccgcacggtcggtgatatgggcgggatcacaagttcacttccgcatttcttgataccggatgttccgtggacgtttgagacattgcggattattttcccgtattctctggcgcttgctttcgtcggattactcgagtcattgctgacagcccagatcattgatgaaatgacggatacggatagtgataagaacaaagaaagccgcggacaaggcatcgccaatattgtgaacggatttttcggaggcatggccggatgcgccatgatcggccagtctgtcattaatacgaaagccggcggacgcggccgattatcggcttttaccgccggcgcgtttttaatgtttttaattgccgtattaagcggtatcgtcgtgaaaattccgatggctgcgctggtggccgtgatggttatggtgtctatcggcacgttcgactggtcatcgattaaaggtttgcggaaagcgccccttactgattcgatcgttatggttattaccgtcgtgacggtcgtcctgacaaatgatttatcaaagggtgtcttcgcgggtgtgatattaagcgcgatcttttttacggcgaaaatttctaagctgaagattgtgtcacattccgaacagaaagatgtcagaacttataaggtaacgggacagatcttttttgcttccgtgtctgagctcatgaatgccatcgtttatgatgaagacgtgaaacggattgtcattgatttgaccgacgcccacgtgtgggatgattcgggagcggcggctcttgagaaaattgtcgccaaatgtaaagaatacggaattgaggctgaattaaagggattaaatcagaaaagccgagatttaatgaaacaaatggcatagaatttgtgaagtccggatgaatatatccgggctttttttcggttaaatttgccggggggcattgttataatgaatgagacttgaaaaccgtatataggagacttgcatatgatgtggcttcagaagttgaaccaagtgttggggagaatcatgccgcttttgactccgtcaagtgtggcggcgggtgtgctgttatctcagcatatcagctggatggccggcgctgtgccgtggatatttgcatttattacatttacgggcagtctgagtgccaattttcattcgctgaagcgcagtatcgagaagccgctcccgatgatcatggcattgtttgttctgcatattttcatgcctgtttttgcatggggaagcggccatctgattttcagcggtgaccctttaactgtgacggggctgattatgggtgtggtgattccgaccggaattacgagtttgatttgggctgcgatgtataaggggaatgtcggattgacgctgtctattatcctggttgataccgtgctttctccttttatcgtaccgttaagcctgtctgtcctggccggggcgaatgttcagatggatgtgtggggaatgatgaaagggctggcggagatggtggtgattccatccatcgcagggatgatagtcaaccagttttccccgccggtaaggactcaggcaataagccggtcgctgtctcctttttcaaaaatctgtctgatgattgtcattgccattaacagttcggaaatcgcgccgtatgtcacgcacgtggatatcaaatttgcgggcatcgctggcatggtattttttattgccatgacgggttatgccgtggcatggctgatcggaaggctgatgaagcggagccaggatgaaattgtgtctctgatttatacggggggcatgcgcaatatcagcgccggagccgttctcgccgtttctttttttccgtctcaagtggcggttccggtcgtcatcgggatgctttttcagcaaatccttgccgctttgttcggctatttgctgagacgctttgaacttaagccggtcgtgatgaagtatgaaaaaaaccgctcagctacgtgagcggttttttccgtacagccagcttagtgctgcattgaattgtcgtttgaatgcttcttgatggtgcacggcgccctcttcgatcgtgaaagagagctgagattgagaaaagcctttttgcttgaggctttcgtacacgtctttatttagtcggatcatgttgttttggatgttgtttttatgctcagcttcgcggctgccgacagacataaagatacgccgccgtgccggacgcaaagatgcggagcggacataatctgctgatttttcataccagaaggaaccggaaatacaaccgattctgccgaatgtttcaggcttttggagcatcgcgtatatcgaaaacagtccgcctaatgacgcgccgatcagtcctctcgtttccggatgtgcagaaatgtgatgcatatcttcaacagtgggaatgatgacatttgtcagctcctcgagaaagagcctccctttgccgccgaaatcatgaaacgcagggctcagggagggcgcgggccacggcgtgtactcatcgagcctgtcagccggtttgatgccgatgaaaatcaattcgggaagtgttccgttcgcaaattgggattcaagcttatccatctgttctaaaaacaaaaaacccccgtccagtacgtacacacagggtaaagcccctgtttgaaccgaataggagggaggaagatacacagtgcattcctttccgtttatccggtgttctgtaagggtgcctctcatgcatccagccccttcttttgcttaaacagaagaaaaaagaaataaggaacgccgagaatcgcaagaataattcccgccggcacttctgaaggctgaaagaacaatttgcccgcaaagtcggcggatatgacgaggagcataccgaccaatccgctgaccggtaatgagtatctgtgctcaatcccggcgagcctgcgggaaatatggggcgcgatcagtccgacaaatgccatgctgcccgctgcggttacacatgcgctgatcaaagcgatgcaggcaatgagtaaaatcgttttttctttattggttgaaacaccgaggcttttcaccgtgtcctcatcgaaacgaatggtatccagcaatgacgttttcgccataagcagaggaatgaacacgatcagccacggaaggatcgccgtaatggtcaaccagtttgccgaccagatgctgccgtttttccaaaccatcgccatctcataatcctgcgggtccatttttaatgaaagaaataaagacagcgcgctgaatccggaattcatggcgatcccgacgagaataattctgcccgattccagatgcccccggtgccaggcgaaaatatagatcagcacggccgccatcaatcctccgatgaggccgaagacaggcatacccatcgcagaggcaagtgccgtcgcttcagattgtccctgaaacagaagcataaacgtgacgattccggctccggctcctgcattaatgcccaaaataccgggatcggcaagaccgtttttggtaatggcctgaataacggctccggctatccccaacccgagtccgatggcagcagccatgacaatgcgcggcagcctcagctgaaacagcaaaatgtcatattgcggattcggatggatgcggaaaagcgtactgagcagttcacccggctttgcggaaaaagaaccgcttgtcatgctgaaatagcttacgagcaatatgagagcaatcagaatgatataaattccggccattttacgtaccacgctgatcccctccttttcttttaatcaaataaagaaagaaaggaacaccgatgatagaagtgacaacttcaataggcgtctcaaacggataattgatgaatcggctggcaagatcgcaaagggtcaggaagacgccgccgatgatgcacgcgcatgggatcagcctgctgtagtccgatccgacgagaaaacgtgtaatgtgcggaacgaccaaaccgacaaatgcaatttttccggcgagtgccaccgagcttccggtcaatatgacaacggccgtcatcgccatgagtttgatggttcttttctgctgtcccagactttttgaaatgtcgtctcctaatgatacggcagtgacctttttgctgagaatcatggccgtgatgattccgatcgcaaaaaacgggacggccagtttcaaaaaatcagggttcatttgatgcagtctcgcactgtaccaaaaactgagatcctgcgaaatttgaaaataaatcgaaagcgcagccgacagactgctgagaagcatacttgtcaccgttccgatgatggcaagctgcaccggggtaaaaccgccgggaagaatggaggccagcccgaaaacaagagcagcgccgaatgcggaaccgataaacgagtatatgatcatttcaatggatgtcgattgagggagcaataccatgcaaagggtgatgataaaagcggagccgtccgacacacccatgattgaaggcgaggccagatagttccgtgtgattccctgcatgagcgctccggaaacagcaagggctgcgccgataaacatagcgccggcagccctcgggattcttgaatgccatatgatctgatggtcggtattctccggattaaagtgcagcaatgcggagaacacggtatggatgtcaagctgctttgcgccgtataaaacggaaagcagcagtgacagaacaatggcaatcggtgaagcaatgataatcatgtgtgtccgccgttttgcatacatgtgaaaaacctactctttattagtcttgagtcaatttgtcagccgcaacctgtaagaagctgattttactccacgcggttccgccttgggctaacggatcaatcgtattgacgtatacatggtcttttttgactgccttcaggctcttccagatcggatttttctctaagtctttcaaagcgtccggcttatctgcgttttcgtcatcagagaattgtacgaagatatggtcagggttcatttcgcttaatttttcaagagaaatcagttcctgcgctttcgccgctttgacttcgtccggcgccttcaggcctaaatcaccgtaaagcgtggagttgaaatatacttgttcaggataaatataaatattgccttgtctgattctgatgaccagcgcgtttgactgtttcgctttgctgttgatctttgtttttgtctttttcaggtcctgttcgtaatctgcgatgatttttttcgcttttttctctttatctgtaagctgggcgagcagcatcatgttttctttccagtttgatgagatatgagagacagggatcgtttcagcggtgccgctcaattttttcaacgttttttccgggaatttggttgatgccagaatgacgtccggctgcagctcaagaattttttccatattcggctgcattttttcccccgttgatacggatttatctgtaatatctttaaacagttccgggaatttgcccgagaaagaaattgctcctgccggatgaacgtcaagcaatttggcgtcttccattgattctacgctgcctgtaatggcgattttgtcagtcggcgctttgacttcatatgtttttccgagatattcgattttctttttatctgaagaagcgtcctttcctttacttgctgtatcagatgtttctgagcttccgcaagccgcggccgtgaaagccaaaagcaaaatcatgaaagcgaatgccaatttcttcatctattgttcctcctgttcaattgataactattatcaattggaattatagagaatgaacagggataagaccatggataatttccggcattaccatggacgatcttcggaaaaaatagaaatgctttgctcgatcatccgctgatgtccgcttggagaatattcaatccacgggtcagatgatataggaaacacgcgtttattgctgacggctctaaggttctgccatatcccggtctgctgaatccgctgaaaataacgaagcgtttccggttctttacaagtgaaaagcatgatgcagtcagcctggcaatccgccagcatgtccaaggaaatcttttcgtcaggagcaaaagattccggttttgcggaggcaaagcctaaatcaccgaagaagacatcctcaatactgttgttatgggcgatgtacatattttctttatatacacggacaaataagaaccgctgatgccgcacgtgtttcagagcatctttcgctgaatgggcgagactttgataagctttaagccagtgccgcgcttcctgctcttcattcaaatatgcggctgtgcgaagaaactggtctctccaattttcttgagccggaaggtaaaaaacgtcagtgatgtcattcaggcgctgtttttcttcttcactgacagaatcaagactgaaaatgatgtccggggcagcttgggaaagcgtgtgcaggttctcttcccaatttgcattatagcggtaagcactcaggtgaaccggaatatcggaagagaattgtttgtaataataggccgtccatttcgggtgcagcgccgcagcataaggcacgtgatgcagaggaatcagatgccccatcgtttcttttccgtacgcggccatttttgtgcgcctttttttcatatagcttgtgggtgagctgccggtatgttttttaaagatgcggctgaaataaaattcatcttggtagccgatttgatgagcgatttcccgcagtttgcagtttgccttggccatcagttttttcgcattggttatgcggatgtctgtgatatattcagttacgctctgcccgtatagttttttaaaggtttcactgtaatgcttgggactgattcccgccatatgagcgagctgggtgagcgtgatttttgtgtcggactgagcatgaatgaattgttttgtctgttcgatcgccgctttcgtattattttgatggcatacttttgcggcataaaggtcgtacatcagctgctgaaagtcggctgtatatttcattttctgcaatctatccgccgatcgcgcattttcagaaagtgactgaagccggcttgtcaaatgatcaaccgtttgtaaattcatttgctgaagtccgtggaagatgtcttccccgttatccggaagcatcgcttcatcatctgatgaataggagaaaacacggagtctgacgatatacaaatggacgccgcctgacggtataggggcaatattgaatgtctcatcacaaggacagatgtagagcgtttccttctgcagcggaaagctgtctgttccgatatcaatttgtccctcgcctttcacatgaaagatcaatacgggggaatcagtgagctgatgctctgacagaaggtcggctgttttttttacggagatgatatcaatgggctgaaagaataatgtgtttttcatgagaaaccaccttttaggaaacattcatttaaatgataactgttatcatttaaattgtaccaaataaatgaatgttttcctataaaaagcggaaatgtgaaatgcgtcaaaatgttacacgtgtaacacgaatgttgtcagtatatgaggtattgttttcttagagttttgaattggtccagccggcgttgatatgtgccggtgatgtcttcaatggaagtgcctttttctatttttttgcgtacccagccgttaccgatcaacttgtcaaaagagcctgtcggcaagaatgaaaagtcattcggatataagtcatgcatggttttcagaatggaaagccctgtttttgccgcttcaaatgtgtttctgtttgttacgtagacttgtacgccgtggcacagcttgccctggtgcttggagaagctggggataaatgatgcggctctgaaggtgacgcccggaagcttgagactgttcaggcgttcttcgagctcggtgcttttcatataaggcgcgccgatcagttcaaacggctttgtcgtgccccttccttcggatacgtttgtgccttcgattagtcctgtcgccgaatatgcgaatatgctgtccggagtcgggatattaggcgaagggaggacgaacggcagaccggtatcttcaatcgtcatcgtccgcttccagcgcttcatttttacgacggttaggtcggcgccaatatgaaactctttattgaataaaagagcaagttcaccgatcgtcatgccgtgcttcagcgggatcggatacagtccgacaaatgaagcgtaatccggttcaagaaccgggccgtccggatttcgtccgccttgcggattcggccggtccaagacataaaaaggtatgcctttttcttttgccgcttccatggcataggccattgtataaatgtaggtgtagtatcgcgttccgacatcctgaatatcgaaaatcagtacatctgtatctttcagcatgtcaggcgtcggtttcctcgtttccccgtataggctgtagacgggaagccctgttttttcgtctatataggatgtgactttgtctccggcctgagcatcgccgcggacaccgtgctccggtccgaataatgccgtcaagtggatgtctggcgcctcatacagcacgtcaacgctgcttttcaatgacgcgttcacaccggtcgggttggtgatcagcccgaccctttttcccttcagttcctgtttataatctttcagcaggcggtcgatccctgtttggatgcttggtttcttggcggtatgaaggtttctgtcagaagccgccgagactgccgtcatagcactgatgacgacaagtccggcgagaagtgcagccgtatgtgttttcataatcagccctcctgtttaaagcggttttccggtcttcagattgataccgaaaccataaggatacagtgtcgttcccggatgcgtgacggaaggaatgtcagcgggcagcctgccttgcggtgttgtctgtccgaatatcgcttcaacgcctgccggaatgtttggctggagaaattgtccgtctgtatatcctttaaagccgtagactgcgataagggcttcagcttcttcaaagttcgcggcgtcatatggattacgcaggctcatcagcacaaagggtttttggttcgattgtgcggctttcatgacggcccgcggaaatgcagtcgtccacttgccgggatctgtgacggaatcgtcaatcacgccgtcgtttacgacaggatcatttttcacaacatatgagcctgtaatcacgtaatcagcgtcagatatctgctttttgtgttcatcatgaaatgtacgctcggcgaagttcattttactgatggttaccggccggatttttttctttttgatgagctgccgaatggtttgttccattgacgctgtttgatcttcatatggagcggcaatgagaacgcggctgttctttttcggtttgaatgggagggtgcggtttttgttttgtaagacggtgacggacctttccgcgatttgtttttcagctttcaggtgatttttgctgccgacggttttctttgcttttgcaatcttctttttcagatttgtctctttcggtgcgggatatatccctctttttattttcagggaaatgatgcgttccgccgatttgttaatttgctgcagcggaattttccctttttgtaccgccttttttaaagcggaatgaacccgggcaaagcggttttccgtttgcagcgatgtcacttgggccggcatcagggcaatatcgactcctgcttttacggccatgacgaccgcctcttcctggccgaaatgatcggcaatggctttcatatttaatgcatccgtaacgatgacgccgttaaatcccatttctctacggagaagatgagtcatcacttttttcgagagtgtggcgggtacgaggatgtctgaaccgtccagcttgcttttataggttgtatcgtcaaacgcgggaaattgcacatgggctgtcatgatcatatcagctccggcctgaatggccttccggaacggataaagttcaatctgacgcagcctttcttgattgtgggtgacaagcggaaggccgtagtggctgtcgacatccgtgtcgccgtgtcccgggaaatgtttgacggcggcagcgacatcctgcttttgctgagccttcattgaggcaagaccgagtgaagctgtcagatctcggtctgaactgaacgacctgacgccgatgacagggtttccgggattattattgatatcgagaacgggagcgaagttcgtattaatgcccagtgctttcagttctttcccgataatggcgccggtctgggacgcgtaggctgtttttctagcggctccgagcgccatattgcctgggaaatgagtgccctcaccaagtctagttacgatgccgccctcctgatcaatgcttaataatagcggaatgtcagggctcgccttttgaaaggcatctgtcaggcgtaccgtttgctcagtgttttttacattttctgcaaataagataacgccgccgaaccggtacttttgaataagccctgcgacttctttattcatttgggtaagagcctcaggtgatgactgcccctttttttgccaattgcgaaaatcaggcatgagcatctgccctaatttttcatctaatgtcatacgggataccgcttgttccgcctgtgacggaatgtccggttttgtcgatacatgatgcgtgccgaaaacaatgaacaacagtaatacagctgagatgacaagtttcatgatggtgccctcctgccgtcatagtttggacaaaagacatgggttgtcattcaatggcttcataaatcgtttttatgacgctgccgtagcttccggtcggaaaaagatccccttcaaaaacattcgggttttcaccgggactgacgacgggggaatgctttttattggttaaaagtgcgatccccagcttataagcgggatcaataatcgtgacggtgccggtccatcccgtatggccatatgcctgcctgcttgcataagggccgaacatccactccatatccgggctgccgtttttccgccagccgagagcgaaagtcggatcagaggatgccgccgttgtgaacaaatcggccgttcttttattgaagagagaaacgtgtttataactgcctccgttcagcatgacttgaagaaggacggccatatcatcagctctggaaaacagcccggcgtgaccggacaccccccccattgagtaaaatgctttttcatcgtgaacttccccctgcagcgtatacgtcctgatgtgaggaaaatggatgactccgtcacgtgtgttgcctaaacgttcagtagctgcgaatgctttttctttaaagcctttttgcagcggattgaacagtgtgtgcgtcagtttcagcggtttgtacagttcttgttccgcataggcatcaagggtttttccggttatgttttcaatgatgcagccgagaagcatgtaaccgatatcgctgtatacgtgttttgttcctggtttgtatgcaagcgggatttgagtgagaaaacggatcgttttatcccgttcttgtgaatacaaagggcctgcggtgtccggctgatagaaataaaagcttgccggcagaccggattgatgctggagcacatcgatgacgcgaatgcggtctttttcttgaatcggatcgctttttctgtctttgaaatcaggaaggtaagccgcgactttttgatacacatcaagctttccctggctgacgagtcgctgtaatgcaaaattcgccgcgtacatttttgtattggaagctagatcaaacatggttgatgttttcatttttttcggacgggataaaagggtgttcccgtcatattttttgctgtagccgtatgctttctttttgatcacccgtccgtcctttacgacgacgaggacggctccggggaatcctgctgcgatgtctttttcaatcatttgatcaacctttctgagctttgctgcgtcgtataatttggattgggcttcggctttgtgctgcggcagaaaagagaggctgatgaccattgtgagtatggcggctgtcagtgttttcatattctgatccctcccggtttattcaaattcagctgccatgtcatccttaaatccgaacgcataagtgaagacaaagcccgccgcgtaagagatgaagagaccgatgatatacaaaacgatttgagccggctgtacgagaaacgagagcggaaggccggagacaccgattgaaaaagtagccacctgaaaatgggcttgaaaggcgccgccgattcccgcccctaaacacgccgtcaaaaacggccggccgagagggagcgtgacgccgaagatgagcggctctccaattccgagcagaccggatggaagtcctccgccgatcgctcttttcaatgaggctttttttgttttcataaagatggcgaaggccgcccctacttgacccgcgcctcccatcgcgagaatcggaagaagcgggtcatctccgattgatcggattaattccaaatgtacgggagtcaagccctgatgcaggccggtgacgacaagcggcaggaaggcggctcccagtacaaaccctgagagcactcccccgacattcagcagcgacaataaacctgatgtaatcagatcagaaataaaaccgcctgcagggataaaaacgacatatgtcaccagcccggtgataagtaaagacaatgtaggcgtgacgataatgtcgatggattgatggacgtactttctgataaaccgttcggtataagcgataaaaaccgcagcgaaaagaacgccgattaatcctcccctgccagggagcagattctctccgaacaaactgatattggcgatctcagggttaaggatcaatatgcccgcaaggccgcccatcgcaggtgtcccgccgaattccttcgccgcattgatgccgacaaggacgccgaggtaagcgaataagcctgaaccgataaccgttaaaataagtgcgatttgggattctttcgggagccagccggcctgaatgacggctttcgtaataccggtgattaaacctgatgcaatgagtgcgggaataaggggaatgaagatgcttgatatttttctcagaaacagtgtgatgggtgtggtgttttttctgttgagatcggcttttttccgtgaggcggcttcttttaaatcaatgttttttccggatgacataagttttgcgaaagcgtcagcgacatgattgacgacacccgtgccgagaatgatctgcagtgtttcggcttcgacgacgcctattaccccgtcaagccgtttcagcgcttcaatatccgttttgtcctgatctaaaggtgtaatcctcaggcgtgtcatacagtgggtaaagcctgaaatattcgatgaaccgccgcaattgtccaggatatctttggccagtgactgataaaatgcctctttgctcatggagatcctcctttgtccgtacgatttttcccggagagctgtgcctgaaacgcgtcctaaaagcgcctgcgccgatcatgaaaacggcgcgggctcgtaaaagcacattattcttcaccaaagaacgatcagcgttctttttcttttgaaacgtgctgttcaatggctttgtcaatgaagccctctgcttctttgagcagtgccttcgcgtgtgtttcgtctgaattcgtcttcagcatgacgattgccgttttgacatggctgcctgcggcctcaagcgtttcttttgccttgtcgtacggaacgcccgtgatgctttggataatgccgattgcgcgttctttcaatttttcgttgctgacatgaacgtctaccattaaattttcgtacactttgccgcttttgatcatcacggccgtggaaatcatgttcagaatcattttatgtgccgtcgccgctttcattcgtgttgaccctgtaatcacttcggggccgacgacgacttcaatgctgtgatcggcataagtgctgatcaatgagtgtttattgcatgtgagcgcgacggttttggcgccgattgtttttgcgtatttcagcgcaccggccgcatacggcgtgcgcccgcttgccgcgatggcgattacggtgtcttctgcggtaagcccgatcgttttgagatcgagagcgccggtttcctcgctgtcttctataccttcagccgcttgcaaaaaggcgtctgctcctccggccatcagaccgatgacggtgtcgggacttacgctgtatgtaggcgggcattcaaccgcatccagtacaccgagtctgccgcttgtgcccgctcccgcataaatcagcctgccgtttcgccgtaatgattgatgggcgaattgaacggcaatctgaatatcgggcagcacctgctgaacggcttcagccactttgaaatcctcttcgttaatgatgcggagaatttccatcgtgtctgcttgatggattgaagcggtctgcggatttctggtttctgtggtcaatctgtgaatgttaagccggtctgtcatgattgtaccctcccaagtcgttaatacttgaagtatatgggcttctgaatagatgtttcaagaaaaatcggcaggggtgagatgaataatcaagcgctttcacaaaaaatgatgcagaatgtgctgttcaccgatggggccgatcctgcgacgacctttatcaataaaaccggaagaccggtacaggttctttgcacgatgattgcgatggtttacagcaagcacgatttcatcacaccaaggaaagtaatttgcgacaaaagcggggagctgcagcatcgcttgtttggcataaccttttccctgatgcggcgcatgtaaggacagcgcactcagcaaaatggcagacacattgttcgaatacggggcaatggtttcttttgaggtatgtaaaataaagaaaccgacggggcggtcttcatttaaaatgactgtcgggtagcgatcccggatgacaagagcctgcggcagtacatccttcggcagagctgtgaactttttatcttcttcactcagcacaaacccgttcagtccgtctgcatgctccggtttataaaaggacagggctacatccatgatatctactctccttttttaaaattgatacaattcatcttctgatagaacacggcagcctgcccgttttaaaagagcggaagtgatgccgtctccgattattttttttcctgagaaagtgccgtcatagataaagctgctgccgcaggacggactgttttctttaaggatgaccgttgcggcgcctatttcttttgcgtatgctaatgttttttccgcgccgtccatatataaagccgtaacgtcttcgcctgatgccgttacgattcttgctgttccgttcagcacgtcttcgcccgtgccgccgatgatttccgccggttcgcggggagtggtgaagccgcccaaaagttcggggcagaccataacagctttcttttcttctacgagtctgcggattttttccgaagcggcgtgagagccgttatacctgcattcgataccgccgagacaagagctgactaagatcatctgtgtccattcccttcaatattttgatactttcatcataaatgaaataagagaggagggatgagtttttcagttaaaaaacgggtaaaaaagtttgaaaataaaaaaaataattttcctctttacaaatggggtacaacctgtatataataacttttgtcagctcgacgcggacacaacggcccgttggtcaagcggttaagacaccgccctttcacggcggtaacacgggttcgaatcccgtacgggtcatatggaggattagctcagctgggagagcatctgccttacaagcagagggtcggcggttcgagcccgtcatcctccaccatatttgccggcctagctcaattggtagagcaactgacttgtaatcagtaggttgggggttcaagtcctctggccggcactgtttttcaaaaaaatacggaggggtagcgaagtggctaaacgcggcggactgtaaatccgctccctcagggttcggcagttcgaatctgcccccctccaccatttttgggctatagccaagcggtaaggcaacggactttgactccgtcatgcgttggttcgaatccagctagcccagtctcagacaccttttgcataaaggtgtcttttttttatcagcattttgtttcgatttctgattgttcatcagatatactatttttaagctgctgttaaggcagtatattctgtattttccatctacaccctgcctgaaatttggtaaaataaatgtaataaaaaaatgaaaccttttaaaacaatcaacgtatagatacagaccggtgaagggcagaggtaagataaaacatggaaaacctgattaaaaaaagaatcaagcaagtcaaaaaaggcgatcaaaatgcgtttgcagaaatcgttgacctttataaagataagatttaccagctttgctaccgcatgctcggcaatgttcacgaagcggaagatattgcgcaggaagcttttatcagagcgtatgtcaatatcgacagtttcgatatcaacagaaagttttcaacgtggctttacagaattgcgaccaacctgaccattgaccgcatccgcaagaaaaagcctgattactatctggacgcagaagtagcgggagcagaagggctgacgatgtattcgcagatcgccgcggacggggttctccctgaagacgccgtattgtcattggagctgtcggacacaattcagaaaaagattttaaagctgcctgacaagtacagaacggttattgtattaaagtatattgacgaactctctttaattgaaatcggggagattctgaatatccctgtcggtaccgtcaagacaaggatacacagaggcagagaggctcttagaaaacaattgagggatctttaagtggggtgatgaaatgagctgtcctgaacagatcgtgcagcttatgcataagcatcttgatggagatatccttcctgaagatgaaaacgtattaaaacaacatttgcagtcatgcgggaattgcaaacggcattttcatgaaatggagaaatccgtagcactcgtccgaagcacatcgcatgtcacggcccctgctgattttactgccaaagttatggcgaatcttccaaaagagaaaaaacgcgcttctgtaaaacgatggatcaaaactcatccgatgattgcagccgcagcagtttttgtgattttaatgggcggcggttttttcaacagctggcataatgaccacaatttcagtgtgtccaaacagccgaaccttgtcgtgcagaatcacacggtcaccgtccctgaaggcgagaccgtaaagggcgatgtcacagtaaaaaacggcaagctgttcattgaaggaaaagtcgacggcaatgtgaccgtcgtcaacggagaaaaatacatggcctcagccggacaagtcaccgggcagattgaagagattaaccaattgtttgactgggtctggtacgaactgaaatcggcgggccagggcgtcgtgagcgctttggacccgagtgaagatgagtaaagcgtataatcgctttactctttttttgtgcatcgccgcgctggctcatttcacttgagaaatcaaaatgtggtataatgagcacgctatatgatgtacatattgctcatgcagcacaattcataacagaaaaacgaaatgactgaattcttggaggacgaggaaatggcttttgaggacatcccatttttgcaatacctcggcaatgccgttgatattctccttgtttggtatgtgatatataaattaatcatggtcatacgcgggacgaaggcggttcagcttttaaaaggaatcgtcgtcatcgtattggtccggatggccagttcatatttgggactcagcacgcttcagtggctgatggaccaagcgataacatggggatttttagcgatcatcattatattccagcctgagctgagacgggcgcttgaacagctcggacggggccggttcttttccaggagcggaacccccgtggaggaagcgcagcataagacaattgaagcgattacaaaatcgatcagctacatggcgaaacgccgcatcggcgcactcatcgcgattgagcgcgatacgggaatgggcgattatattgagacgggcatcccgcttaatgcgcaggtcagctcggagcttttgattaatatcttcatcccgaatacaccgctgcatgatggagcggtcattatgaaaaataacgagattgcggcggctgcctgttatctgccgctttctgaaagcccgtttatttcaaaggagctggggacgcgtcacagagcggctgtcggcatcagtgaagtgacggacagcttaaccattattgtatctgaagagacgggcgccatcagtgtggccaaaaacggagaccttcacagagaattgacggaagaagcactgaaagaaatgcttgaagccgagtttaagaaaaacgccagagatacttcttctaaccgctggtactggaggggcaagaaaaatggataaattcttaaacaaccgctgggctgtaaagatcattgcattgctctttgcgctgctgctttacgttgcggttaacaacaaccaggcgccgactccgaaaaagccgggggaatccttttttccgacatcaacgactgacgaggctacgcttactgatattcctgtaaaagcatactatgatgaagcgaactatgtcgtcaccggcgtgccccagaccgtaaatgtcacgattaaaggctcgacaagcgcggtgaaaaaggcgagacagacgaagaattttgagatatacgccgatatgaataagctgaagaccgggactcataaggtcgaattgaaggcgaaaaacgtatcggacggactgacgatctccattaacccgtcagtcacgacggttacgattcaggaaaaaacggctgagagttttcccgtggaagttgaatactacaataaaagcaaaatgaaaaagggatatacccctcagcagccgattatcagcccgaaaaatgtgcagattacaggttcgaaaaatgtgattgataacatttcacttgtcaaagcatccgtgaaccttgaaaatgcaaatgagaccattgaaaaggaagtgaaggtgaccgtctatgacaaagacggcaacgcacttcctgttgatgttgaaccgtcagtcattaaagtgacggttcccgtagccagtccgagcaaaaagcttcctttcaaaatcgaaaggaagggaagtcttccggacggggtgagcgttgcgagcattgactcgaatccgagtgaggtgacggtttacggcccgcaggatgtgctggattcactggaatttattgacggtgtatctcttgatttaggcaaaattgataaagataccgatatcaatgccgatatcccgcttcctaagggtgtcactaaggtatcaccggaaaaaatcacgcttcatattaaagtggacagtgaagacaaaaaggattttgacaatgtcggaatcaagacggtcggactgggaggctcacagcagattgagtttctcgatcctgaatcgcaggcgataaatattacagccaaaggctctcccgccaacattaaggcgctgaaaaagtcggacattgaactgtatgccaatgtctcggacttggatgacggagagcactctgtaaagcttgaagtaaacggcccgcaaaacgtcacatggtccctgtcaaaagacacggttaagatcaagctgacttctaagaaaaactcaagttcaaataaaaataacggcggttccgctgattccggcaataagaacggcacaagcggagacgcagacaaagacaagaacaagaaccgggaagacgacactgacagcgatcagaataaaagtcaaaaccaggatcaaaatcaagaccaggatgaagacggatcaagcgctgattcttcttcaacagaatgaaaaaggagcgatacaaaatgggcaagtattttggaacagatggtgtaagaggtgttgccaacagcgagcttacgccagagctggcctttaaagttgggcgttttggcggttatgtcctgaccaaagataagcagcgcccgaaagtgctgatcggccgtgatacacgtatctccggacatatgctggagggagcccttgtcgccggacttttatcgatcggagctgaagtgatgcgcctcggcgttatttctacgccgggggtatcctatttaacgaaagccatggatgctgaggcgggcgtcatgatctccgcttctcacaaccccgtacaggataacggaattaaatttttcggaggggacggctttaagctttctgatgagcaggaggccgagattgaacgtctcatggatgaaccggaagataagctgccgagaccgacaggcgcggacctcgggcttgtaaacgattattttgaaggcgttcaaaagtatctgcaatttttaaagcagacggcggacgaagatttcacaggcattcatgtagcgcttgactgcgcccatggtgcgacatcatccattgcgacgcacctttttgccgatctcgatgctgacgtatctacaatggggacgtctccgaacggattaaacattaatgatggcgtcgggtctacacacccggaagcgctgagtgctttcgtcaaagaaaaaaacgccgatatcggccttgcgtttgacggagacggcgaccgcctcattgctgttgatgaaaaaggaaacatcgtcgacggtgatcagattatgtacatatgcgcgaagtatttgaaatcagagggccgtctgaaggatgataccgtcgtatcgactgtgatgagcaacctcggtttttacaaagcgcttgaaaaagaagaaatcaaaagcgttcaaacggcagtcggcgaccgctatgtcgtagaagcgatgaaaaaagacggctataatgtcggcggcgagcagtcagggcaccttattttccttgattacaacactaccggcgacggtcttttgtccgcgatcatgcttgtgaatacgctgaaggcgtccggcaaaaccctttcagaacttgcggatgaaatgaaaaaattcccgcagctcttagtgaacgtgaaagtgacggataaatataaggtagaagaaaacgctaaggtgaaggccgttatttctgaagtggaaaaagaaatgaacggagacggccggattttagtgcgcccgtcaggcaccgaaccgctcgtccgcgtgatggccgaagcgagaacaaaagagctttgtgacgaatatgtcacaaaaatcgtggatgtcgtgcggacagaaatgggagcggagtagcgaagtttataagcagagagcgaacaagacaagtgcgatcagcataatatgatagtaaacatgatgccggggcggcaaaaaataattgaccgtccttggcacatgctgtaaaatcaagcttgttcagcctttgtttttcacttgcaggaaaggcgggattgtttgcatcttttataattacagcgcccgaactaagcgcccgaaaaacggcttagttgacgaggatggaggttatcgaattttcggcggatgcctcccggctgattcatttagatcacagccgtaaggatttcttcaaaccggaggggcgactctccgaacaaagagaaatcacatgatcttccaaaaaaacatgtgggaggggacgattgaaagtccccttgtaatttgactttcttcgtctccttttgcacctttaggaggaagaaaatatgtgtggaattgtaggttacatcggtcagcttgatgcgaaagagattttgttaaaaggattagagaagcttgagtaccgcggttatgactctgccggtatcgctgtggcgaatgagcagggcgtgcatgtgtacaaagaaaaaggccgcatcgccgaccttcgtgaagtggtggatcactcggttgaatctcaagcgggaatcggccatacacgctgggcgactcacggcgaaccaagcttcctgaacgctcacccgcatcaaagcgcactcggccgctttacacttgttcacaacggtgtgatcgagaactatgttcagctgaagcgcgaatatcttgaaaacgttgaactgaaaagcgacacggacactgaagtagtcgttcaaatgatcgaacaatttgtggcgggaggacttagcacagaagaagcgttccgcaaaacactgactctgttaaaaggctcttacgcaattgcattatttgacggtgaaaacacagacaccatttacgttgcaaaaaacaaaagccctctgttaatcggccttggagatacgtttaacgtcgtggcgtctgacgcgatggctatgcttcaagtaacgaatgaatacgttgagcttttggacaaagaaatggtgatcgtgacaaaagacgaagccgtgattaaaaaccttgacggtgaagtcatgacacgtgcgtcttatatcgctgagcttgacgccagtgatatcgaaaaaggcacataccctcactacatgttaaaagaaacggatgagcagccgcttgttatgcgcaaaatcatccaaacgtatcaagacgaaaacggcagactggccgtggctggcgatgtcgctgacgccgtggcggaagcggaccgtatttatatcgtggcttgcggaacgagctaccatgccggtcttgtcgggaaacaatatattgaaatgtgggcaaacgtcccggttgaagtgcatgtagcgagtgaattctcctacaacatgccgcttctgtctaagaagccgctctttatcttcctttctcaaagcggagaaacagcggacagccgcgccgtgcttgttcaagtcaaagcgctgggtcacaaagcgctgacgatcacaaacgttccgggatccacgctttcccgtgaagcggattacacattgcttctgcacgcaggccctgagatcgcggttgcatcaacaaaagcgtatacggctcagattgccgtgcttgcgatccttgcgtccgttgcagcagaacgtaacggcgttgatatcggttttgatttagtcaaagaattaggtattgcggcaaacgccatggaagccctctgcgaccagaaggacgaaatggaaatgatcgcgcgtgagtacctgactgtttcaagaaacgctttcttcatcggccgcggccttgactacttcgtatgtgtcgaaggcgccctgaagctgaaagagatttcttacatccaggcggaaggcttcgccggcggcgagctgaagcacggaacaatcgctctgattgaagaaggaacaccggtctttgcgctggcgacacaagaacacgtcaacctgagcattcgcggaaacgtgaaggaagtcgcagcccgcggcgccaacacttgcatcatctcgctgaaaggcttagaagacgcagacgacagattcatcctgccggaagtcaaccctgcacttgctccgctggtatctgttgtgccattgcagctgattgcttactacgctgcactgcaccgcggctgtgacgttgataaaccgcgcaaccttgcgaagagtgtgactgtggagtaatatatttaacccctttggttattagccagaggggttttttaatgcggaaatgagaaatacatactctttgcgattgtaaagaaatccccttttatatattgaaaaggagtaacacctgctttataatacgagatgcattccggttaaaatccataaatgtaatcattagtaaatcatttttgtgcatgcctcatcagaaagtaatcaccttcagcagttttcatcatgaatatcccattatataaatgtaatcaatcgattacacatccacattatgcttaagactttaaaatccctgttgtatttgccgactcctgatccattatgaatactcgactagatataaaaataacaacatttttgcaataatccggttcaattctcaaaaaaagtctgacaacaatgataggagtggaatgatgtcaaaccttttagaaatcagaaacatcagcaaatcttttggccataaagctgctttaaaggatgttacattcaatgtgcctgccggatcaattgtcggttttatcggtgataacggcgcaggcaagtcaacaacatttaaaacgatattaggattaatctctcaggatagaggtaaagtgaaaatctttggtaaagagaatctggataaacatataaagttcaaagaagatattggggtcgcatttgatgcgatgaatcttcctgcgcaccttacgataaagcagctgaatcatgtatttaagaaactgttcgaggcttggaaccaagatcatttttaccggttggttcattctttctctttacctatggacaaaaaagtgaatacattctcgcgcggcatgtcaatgaagttatccgtagctgttgctttgtcgcataatgcaaaattattacttttggatgaagcaacgggagggcttgatccctcttcaagagatgatctgttaaatgaattaaaaagctttgtgagcaaaagcaacggcggtattttactttcatcgcacattatgactgatgtcgagaagatagccagccatatcgttattatgaaagatggcgaaattttattaaatgaagagaaagataaggttcttgaaagctatactgttatagatgttgatgaaggccgattggctgagcttgacgaagatatcgttctagcaaaaaggaatcatggatcttattggagtgtgcttgtatcggatcaacagaaattgccgaatggcgtaacggccaacaccatttccatagaagaaatcagcgtctttttaacgaggagtgaaaaaattgagaggtctgttactgactaactattacctggtttatcgaagtttctttgcatacacggggttggccatattggtatcagcagtcattttttattttggggatgcttcaatgcatcgttttgttgctatgctgattattttgtttgtcgtcatgcccgcacttgaggttataaagtatgagagcaagtctggctatgacaggtatgtcctgactttaccggtcagcagaacaaatattgttcaaagccactatgtcttttatcttttgattgttgtgatcggagctgtaatatcttatggtattttccttgtatacagcctgggttctgatgaaccaattgacggcatatttaatattgtctcttttggaacgttcatcgttctctttgccggtgcaatcgtttatcctcttctctacatgataggcccggaaaaatccgatgctatcgtgattggaggagcaatggggggactttttgctacgtttggattgcaaagtgtcgttgggtatgtagcagaacaagtaccgctgtcatttttgcacataaatccttctttatatgtcccgattatatatctcatgatcggcgttatcttatatatcatttcatttttcattgccgcagctatatatcataaaaaagaattttagcaactgatcaagttacaacaggataagacatggcacgggctcataaattcactttaactccaagcagacagccgcccgcacaatgggcggctgttcttctaattaaaactgcgttgtcacatcgtactcataatcaatcttcaatttcacatttttcatagtcgattttgctgttgcgagtgtgttgtatttaaaattccagatgcttgagactgagaggttatcatccagtgtgataccgtaatttccttgagtggagctgtttgcaagtgcacggtgccacactttattttcttccgacatgatgtagtggcttgtatttccttggcttggtgtttgggttgcggtggtgttgattcttttcactgtggcgtctcttggaatgcttgtctgtttggttaagtcgagtctaagaacagttgaatctgatccattcggactgaggcttgtgttccctttattttcagctgtaccgctgaatgagaaggtctcactgccggatttgattcggtcgtaaatagagagagtaaagtacatatcgtcagtgtaggagccgcgggacactttcacgtagaacgtctcgttattttctttcgcatctgtatccgcatagataaaaggtagcgccgtatcaggatttatcacttctgtgcctttactgatcagtactttatttttattataaatttcaatgtccattcccttgtattcacttcttgttgaactcctgacataaagtctttctcccttatttgccgtgaaagtgaaatacgaatctttttccccttttggcaatatggcagtatcaatatttttatatttccagtagcctaccggattggcagtttcaaatgaatgatttcctgtaatggcgcttatttgtaacgagttcttttgagacgcagaggctgaaggtgaagatgcaaacaatgcgcctgataatacgattgcactgacaaatagaatcaatatacacttcttcatggaaaaatccccctttttgactacatcatacataaaaacattagctatgtaaacatttgttatttaaggttaaaatctactggaagacagccgataaaaacactagaacatcatctcaagcggaggttaaaaacatgcgcctaaacgctcgatatataaaaaatcaagtaatggctcagcaagtgcttcagcggtattcttccaaaacaaatgtgaaagatgcggcaaaaggatcggacagcttattgattcagacaggcgggagccgcgatctgagccaggtgaattattcaaggagcggtgtcactgagaaagggagcagcctgtcccgtttatatcaatctgcaaatcagaaaacgattacggataatgggaatgagacggtaatagacgctaataatccatatgagtctgagagtgatattgcgagcaagattcttgatgagaaatacagccgtatcaatgaaatcaataaacgaaaaccagatcctttgcattatattaaggacaaataccagcgtgccgattcaccttatttcagaagtgatttatcagaatcggagcgtcaggccgcttatcataatgaaacggaatggctgtttaaggggaaagcccagagctatgatttccgtgatgcggcgtttcggggtgaaacgctcaacggagagattcaagtcgaaaatgaaaaggtgtttcagcgcgggcaggtgaatcagcagattgagatgcttttccatcggaatcatattcagattccggagggtgcgaatcttacatttacgatatcaccgattgattatctgttaaaagtgagcgggactgacgataaagagctcactcagcagattgaagctgtcttaaactccggggaaaacagcaaagagctgtttgcgcacatcattcgcagccggtgtgatgactcctcgcagtttacgccggaaacatatgagaaatatcaagtcgttcgggaaatgtacgaggtgaccggctatcatctgaaagacttgcagatcgtggacggaaagtacgtcacagaagacggacgcgaccttttagacgtctataaggaagcgctgcagcaagatcctttgttgagacatacggcggcagaagcggccgcccattacggacaggcgctcacgaagctggcgagaacgggttatgatgccattcctgatttggttctgtccattgagtataaaaacggatctctgcgtgatgtcggccaaagcaggcaatacggatctggggatacagattggctttctgaatggaaacgggagctgggtgtgcgtatataaaatgagaaaaaagctgacgaatgatgccgtcagcttttctttatgcgtttacttaaaactcctcatactccgccggatcttggccgtttatgcgtccgtcggggcgggtaagcgagtcgataatgctcatgtcgttttcatcaagggagaaatcaaaaacggagatgttttcaagctggcgctcgggcgatgctgattttggaatcgggatggcgcccagctggatatgccagcgtaaaatgacttgagaaatggttttgccgtatttgtccgcaatctgtccgagtttttgatcgttcaatacttcgccggcccgggataacggactccatgattctgtcacgatgccctgttcttcgtgccattggcgctgctgctgctgattaaaagcgggatgcagttcaatttggttgatgccaggctttacgccggtttcacgttcgagccgttcgatatgctcaggcaggaaattgcagacgccgatggatcggatcaggccccattttttcgcatcaatcagtgcctgccatgcttccgtgtagcggtcttgtttcgggttcggccaatggacgagatacaggtcatagtagtccagaccggcgcggtataaagattcttggatggtttgtacagctttgtcatagtcatggtagcgcccgggcagcttggacgtcacgtatagctgttctctcggaacagagcttctcttgatggcttctccgaccgatccttcattttcatagttataagcggtgtcaatcagacggtagccgatatcaatggcgctggtaatggcatgaacgccgttgtttccattaagagcgtatgtaccgaagccgatcacgggaatgcttgtcccatccagcagtttcttttgcggaattgctccagtcatcattaaatccctccttgttttctactttaccattattcttacaaatgaaacataataatggaaggaaatgagatgatccgcacatgaaaaaagctgacggagaaccgtcagctttaaatttgaaacatccatactacgacggggccgaagaccgatcctaacacggcgcagagcgtcatggaaacagaactcatggagaccgttaattctccgtactccattgcttttgaggtgccgagcgcatgggaagcgctcccgaatgcaattcctttcccgagtgagctgcggatgcggatccacttgagaagcagcggtcctaagataacgccggaaaaccctgcgatcatgacgaacacgactgtcatggaagggacaccgccgataccggacgcaatctgtatggcgacaggcgtcgtaattgattttgggataattgacaaaatcaaactccgactgatgccgaacagctctgcaaatagcaggccgctgaccattccggagaataaaccggccaacacgccgccgatgatcggaaacatatacttgattaacacccggcgctgcttataaagcgggtatgccaaagccaccacggcgggtccgagcagtgaattgatccattgtccgccgatcatatagtcattatacgaaatatgaaaaacaagcagcacggcaataatgaaaatcgtagtcgtcaaaaccggtatgagaaagggatatggaaagcgcacatataatttcaccatagccagataggcggcggccgtgaacaaaattataaggattgcgatacatgcttgctgcacttctttttctcctttctctgattggctttgtgctctaacagctggctggcgtaccctgcggcgatcattgtgacgatggtgctcagcacgatgatcagaaacagagcagccccgctggcggaaaacagtgacgggtaattgatgacgcccgtcatggccggaatgaataacagcggaagaaaagacagcaaaaatccggctccgtcttcaatcattttgacgggaatgatcttaaccgataaacatatgatcagcaggatcaaaccgatgatacttccgggaatgggcaggtgaaagaactgctgaacggctcccccgataaaggaaaatgcgaataaaataatgatttgcagtatgatgcgtatgactttcacgacaatgctgttctttggagaagagcagcttccccctttcttgatgcttcggtaagtttctttactttttacgcatatatttgtactatacaaatatatgtatgcaaaatctttctatatgttttctgagtaaatgtgcatatgtttgtattatacaactaatattgctgttgtcaatgtaaggagtgaggctgtttgtcaaaacaagatccgattgaattaattgaatatgagctcaccacttttatcaggagagctgtttatcttgataactccgaccgtaaaatcggacatctggaaagggctgcgtatttgttattacggcagctggatgaattcggaccggcgcgtgtaaaggaattagccgaatcttttaagctggatatttccacattgtcacgccaagccgcggccttggagtcgaaagagctgatccagcgtttttccgatccttctgacgggcgggtcagtctgtttgcgattacgaagcttggcagacagaggttaaaaactgataaaaagatgcgtcttgagcggtatcatcgtatgcttgacgattggtcaggcgatgaaaaagaaatgttcggccggcttttgctgcggctgaatgaggcatttatcgattaatgcatgatttttgccgagttaagcaggattatggcgtatacaagggagaatggaagagggtaaggctttacgccattctgcttagcaaaaataatattgaatagggggcggaacatgtttctccaggggacatcctgtttctcggaggctgcggcatttattatctcaatattcataattcaataaaaatgaaagcgctttatttttagtttgttgatttagggtgcaaggtgtttacctgaaaaaaacaattgtattttccacggaaatttattatgatggaataaggaaattggagattatataacaatagaaagatagaatatttctaatattgcgggaaatgaagagtgagttaggttcaacaggtgcaccttctgcttcattatttcacatatatcagagctgttaagaggaggaagcgaagtggcaaacaaagaattaaagagaggcttaggcgcgcgtcatatacagatgattgcgctgggcggcacgatcggtgtcggtttattcatggggtcatccagcacgatcggatggaccgggccgtctgtcctgctggcttatgcgatctcgggtatctttatcttttttatcatgcgtgcgatgggcgaaatgctctatgtagagccgagtacagggtcgtttgcgacgttcggccataagtatatacatccgttagccggctatatgacggcgtggagcaactggtttcaatgggtgatcgtcgggatgtctgaaattatcgccgtcggttcgtatatgaaatattggtttcctgatctgccggcatggattcccggcattatcgccatggccattctcggtgcggcgaatttaatttcggtaaaatctttcggtgagtttgaattttggtttgccatgatcaaaatcgtcaccattattctgatgattgtggccggaatcgggattattttcttcggtttcggtaacggagggcatgcgatcggattatctaatttatggtcgcacggcggtttctttacgaatggtttttcaggatttttctttgccttgtctttggtcgttgcggcctatcaaggggtcgaactgatcgggattacggcaggggaagcgaaggacccgcaaaaaacgctgcgaagcgcgattcagagtattatttggcggattttaattttctacatcggtgcgattttcgtaatcgttaccgtatatccgtggaatgagcttcactcactcggcagtccgtttgtttcgacatttgcgaaagtcgggattacggcggcggccggtttgattaactttgttgtgattaccgctgcgatgtccggatgcaacagcgggatattcagtgcgggacgcatgctttatacattgggcgtgaacggacaggccccgaaattctttaagaaagtttcttcgagcggtgtgccgatattcggtacgtttgccgtattaatcggacttgtgatcggtgtcgtgctgaactacatcgcgcctccgaaaatttttgtctatgtgtacagcgcgagtgtgctgccgggaatgattccgtggttcgtcattttaatcagccatctcggtttcagaagagcgaagggcgctgagcttgataagcatccatttaaaatgccttttgcgccgtttacaaactatttgacgatcgctttcttactcatggtattgatcggcatgtggtttaacaaagatacgcggatttctttggttgtcggggtgattttcctggcgattgtgacggtcagctattatgcgttcggtatcggcaagcgcatgcctggtgaaaaatcgaaaatagaagacgctgtataattcaaaaagacacctctcttacaggggtgtctttttcggcttgtccgcgagtggtatactggttaaaaaaagcagaaccgggggaaacatcgatgagtcattaccgtacgttattatttgatatagacaatacgctgctggattttaccgcttcagaaaccgatgcccttcaaaaattgtttcaaggttcaaagctggagctgacggcagaggtggaagcccgttataaagcgttaaatcaagggctgtggaaggcgtttgaagagggggaaatgacccgcgatgaagtggtcaatacacggtttgcccttttgtttaaagaatacggcctcgaagccgacggcgtgctgatgaatcaggcgtaccgccaatacttagaagaagggcaccagatgatagacggagcttatgagctgattgaacggctgagtcctttatttgatttatacatcgtgacgaacggcgtctcaagatcacaatataagcggctgggcgactccggtctgtatccgttctttaaagatgtgtttgtatctgaggacacgggttttcaaaagccgatgaaggaatactttgattacgtgtttgcgagaattcccgatttttctgccgagggcggacttattatcggcgattcactgagcgcggacataaaaggcggtcagatggcgggaatggatacgtgctggtttaatcccggaaagaaagcaaatgagtccggaatcatcccgacgtacgagattcattcgcttgatgagctgtatgatgtgctgaacgtggaggttgtcgctttatgatttctcaatatatgtataatataatttatatcaagttgtctcaggaaggattattatgaaaaatctttcttcaattagtacaagagtgctcatagaaaaaaccattatttggttttccttatattctattatcagttctatttttaaaacgccaactttcacggcttcggaatccgcttacctgctgataatcaccatttttttagtcgtcaacgatcatatcagattaaaatacctaagcggtcagtattcttttagatattatgcatcttttttagtaagtaaccttttatcaggcattttattgtttaaaattaactgtctcggttctcaaatatataatattttcttactgatcgagattattgtaacaactcgtaaactgccctggactgtagtaagcctgcattttattattttttttacagctcttaaagcagcagggaccagcgggaaagatatattgatgtcctatttagtgatcatggctattatttatctgtttagaaacgtactgctcgaaaaagcaaaaatacaaacattaaataaagaattacaaagtgtaaacactaaacttaagaattattctcaaaagattcaagagttaactatttctaaagagcggacaagaattgcacaagagcttcatgattccctagggcattatttgatcgcattaacaatgaatcttgaattcgccgataaaatagtcagtaaaaatcccagcgaggctaaacaagtcatcaataagtcacatgatttatcgaaggagtgtattattaacctgagagaagctgtcgctttgctcaatgaccctgctcctcaaaaagggcttctgaaatcgatcaatgagatttttgaaaattttcagcaaacaaatgaaataaaattcgagcttgatatggacaataaagtagagtcagctgatcctgatatcaagaattgtctctataaaacagtacaagagtctataacgaacgggataaaacatggaaatgctacgtttttttcaataagaatacgtaagtcttttgaaaaaatctctatatcgataactgataacggaacaggatgttctgaaattaataagtcaaatggaataaaaggaatagagaaaagatttgctgcacttggaggagaggttgattttcattcagggctagattcaggatttactgtggaagccgtaatccccgagatagcagatctttaatccgaatgtgaggaggtattgatatggatattatcattgtggatgatcagcaaattgtcagggaagggcttaaaatgattctgagtctgcacgaggaaattaatattgtaggcgaagcttctaatggtgaacatttattagatttgctaaaacagataaggcctgaaatcattttaatggatataagaatgcccataatggacggcattgaagcaacaaagctagttaaagagagatatccggatattaaagtgattatcctgacaacctttaatgatagtgaatacatttttactggactgaaaagcggtgctgatggttacatactgaaagattctgattcacaagaaattattgattccatcaaaacagcatgtgaaggcaatattctgttaaatcctaaggtaacgctaaaagttgtaaaggctctaaattcggtagaacataataaagaacttgttcaagaaaataatgaaaaggaacagctggtgcaattgcttactcccagagaaaaagaagtcgctaaacagattatggaagggaaaagcaacaaagctataagcgaagcactttttattactgaaggcacagtcaaaaattatgtatcaagaatactggaaaaacttcaaatgaacaatcgaacggagcttagcttatatttacaaaagcatatgtgattcaacttttttccttcaatcagaaaggaatttcatcaaattcctttcctccattttcttctgaatatatccggacttacaccttccgtatatgactaaagtaacaatgagattcctaactaaagtaataaggtaaatgagtactatagtaaattctaaaaatattccattcaggttaaaataaaagaaccgaaataccacgaggggtgttttaattatgctcgaattaaaaaaacttaccaaaaaatatgatgactttacggcagttaataatatttcgctgactgtagaagatggagaagtattcggactattgggtcctaacggtgccggcaaatcaacaatggtttctatgattagcactgttcttgcacctaccagcgggacaattaaagtagataataaatcacttaaggaaaaacctattgagataaaaaaaataatgggggttgttccacaggatttagctttatatgaaacgttaagcgccaaagataacttgaacttcttcggaagcctttacgggctgaaagggaaaaagctaaaagaaagaactgatgaggttctggagattattgaactgacagataaaaaaaatcaaaatgtatcagagttttccgggggaatgaaacgccgggtcaacataggtgtggcgttaatgaataatcctaaattattaattcttgatgagcctacagtaggaattgatccgcaatcaagaaatcatattcttgaaacagtaaaaaggctgaataaagaaaaaggaatgactgttatttataccagccactacatggaagaagtagagtatctttgcgagaaggtggcaattgttgatcatggatctcttattgctttaggaacgaaagaagaactcaaggaaaacttaaatgcttgtgacactttaaccgttacttttaagggtgctgatgaagaggcactcagccggataaacagcattacaggaattgataaagtgacggtagatcataaacaaatttcaatgcttgtatcgacgaaggaaagaaacatcattgaaattgtagatgatatcaaaaatctggggatcgacctcactagctttaagtacgaggaagtaaatttggaaagcattttccttcaaattacagggaaaaacctaagagattagtaggaggaggctatcttgagaaaattattcaacttattttttcttgattttaagctgttaacaaaaaataagtcattttatttaaagctgatgctgtttccatcactgctaatcctcatattgggcagtgtgttcagtaattcagattcaaaaatcgaagcatttgatgtagctttttactcagcagattcaggggagagtgtttctttaggtgatatcttaaaggataaagtttttaagaaaggcgatctcaaagatatcattcatttaaaagaagctgagagctacaatgacggtgaaaaattagttaaagaaggaaaggctgcagcttttatctatgtaccggaacactttacgaaagccgttatgaacaacgggaaaacaaatatcgatttaattggagataataacaagaccatagataaaaatattgttcaggctgttttggagggctttacgaaaagcgtgaaaacaatgagcgctgagcaacaagaagtaataaaacatatcagctccggcggcagcgtaccaaaagaaaaaatagaaaaaatgatgaacgatttggccgataatgacgggatctccgctgatatcccaaaagcagcgacaaataaaaatgcggttcctgtcgattccatgcagtattattcaattgcaatggttgtcatgttttccattatgacggcttttgtgcttgttcacagcattgttgatgagcggcagaataatacgctgttcagaattaaatctacaccgactttaaatattcagtatgtgcttggaaagttgacaggtattatttttgcgatcttaatgcagatgactgctgttattctgataagctgggtcgtattccgaatgaactggggcaacttgtttgatatttttgttattacggtagtatacgcatttgctataggcagcattgtattgttttggggttttaccgctaaggaccacgtggcggtgtccagtatggcttctccggttctttatatttttagttttttgggaggcagttttatttctaagaacggactgcctgatagcttgagggttgttcaagagatcataccgaacggtaaggcaataaactcttatttaaaagtcaaacagaatattggtcttagcggcatgtatattgatttgcttgagctaattggtattggtctcatctttgtctttattaatattatggtattcaaccggaagaaggtggcgtagtagtgcaattgattgccatgattaaacatcagctgaaactgatgctccgaaatagattagcaatttttgcaacgatttcggtgccgttaatccttacatttttgttctctttttctcaagatacggatagcaaagagaacttgtatatagccaatgctgataaaagtaactatgctgcaaagctcattgaaatgataaaagagcataaaaatattaaagttataaagctaacggaaaatgaattaaagaaaaaagtcgatgatcaggatattccttttggggtcgttattgaaaaaggttttggaaaggatttgacggacaatcacaagataaaaatgaaaatcatccaaaactacgagaacggcagcggaacattgttagagcagctggtcacaaatgaggcgggaactcttaaaaaggtagttaaagattcgcaatatatgtctgcacagttgcatacggactcaaaagatatagaaaagaacattttcaagaaattgaaaaacaatttaggaatagaagtgaatgacaaaacattaagtcagggtgaacatactcaggataatgcgaccgtgagattaattggttttcttgtaatgtttatttggtttgttgttattcaagggttaagaacacttattgatgaaaaagagaataatactttcagcagattactaagtacgcctataaactatacaaaatatgttttatccaaaatggctgctacttatatttccggaatcattcatataatcgttattatacttgcgggaaaatatttactcaagatcagcataggtcataacatctttgccatcgctgttatgctcgctgtttatttatttgcattgacctgcattacgatgattatggttccatttatgagaagccaaaagcagtttacttctgccgcatcgatcataattgcagtaagcgggatgataggcggttcctttttctcattggaaattgctccaaaatatatgcaggttatttctaaatttacacccgaagcatgggcaatacagtctttaaacaacattatctttagtaagagtaccttaggaactgaatggcttccgatcgtaatttttgcaagtgtcggcttattaagtattattgtatctttcatcttaataagcagggagattaaaaaaaagaaaaattaaatcaacaataatctgataaaattaacagatcaaaaaggacgtgagggaattgggtatggaagaactatttggaatggctgaattaattataggtgtactcatgaatgtatttatcggtaaaatcgggcaagttgcttttggaaaagataacagaacaacaaggatcattttaagagtaataggaatcttcctcatcatcaacggagtttcaagagcatttcatatataaaatgagatagtaaaaaacatccttttcagggtgtttttttatcgggttattacaaaatttctgaggtgaattatgaaaaaaatattttgtcttccgtatgcagggggatcaagtgcaatatactataaatggagaaggttaatgagtgactctttaacaatacatcctattgagttaaaaggaagaggtacaagaattaacgaagatttttatgaacatatagatgaggctgttaatgatatatatgatctgataaaggatcaaatcagggagtgtgattatgctttattcggccacagtatgggaggccgattagtttataagttatatagtaaaattgctgaaatgcagcagaagaagccaaatcacatatttttctccggctgcggcattcctaaaacgaagaaagcagaggggatgattcatgctttgccggataatttatttttgcaaagaatcatggatatgggcgggacttcggaagaactgttacataacaaggaattacaacaattatatcttcctattttaagaagtgatttcaaaatgttggaagaggatgtgatttctgaaaataagactgttatggactgtgatataacagtgttgcatggtaataatgacaagacgataagctcagatttaatatgtaattggggacattatactttagggaaatgcaatttttatacgtttgaaggaaatcatttttttattcatcaattttcgaatgaaataactgacattataaataaaaccttgagatgaatttttgattaaaaaatcgggagtgttactttgtcccggttttttttttatgttaatacgaaaaataaaaactaggttaatgtgcttaggtgtttttccccccctaattgacaactcttaaacatttgtataatatttcttaaagatggctagttcttcttcattatcctttttttaaaaaaagtgtttgtacgggtctatatcattaaaaaatggtttttgctgccgataaataaactgtcagactacaacaacaattattggtgagcggtattgcctgtgatgcagtttaacataaaaatccaccgaaagcctctgctgttttaattcagtgaatgatttgaattttgatatcaattgaaggagtttttgttatgacaaaaagtataaagggagataaagacagtattggtgagttaaaaactgaagagcattttttagtggcaagtaaaccttctaaagaaaaaagaatgaaaaatcttacatataaattgtcacagcaattaagcgataagctgaatgtatactgcaatggatcggatgaacgtctgcatatcgtattaacagcggcactgactttgttaataaatcaatatacagaaagacaaaatattgtaatcaaaactcctgttttcaaaaagaacagaacgattgattgtgagcaagaaattttgactcttaaaaatgctgttcatggtgaagacctattaaaagagatcatacataaagtcgaattcaccgtagaacaggcattggaaagcccccaaaataattctcgaacaagtgataaaatgactggccttccttttgatgtcatgatagtccttgaaaatattcaagaatacatacttaatcaagaaaatcccgctattcatatcctattttcgtttatgaaccagaaacaatacatagagacagtcatacactataacgaatgcctctattctcaaaatatgataaaagatttgtcactgcgatttcagatgatccttgaagctatgataactcctgaaaatatcagagtgaaagatatgagattcctgaaagaaaaaaataagcaaaagaaaatctttggctgggaagacaattattcgaaaattggaacaatttcggaggtgtttgagcagcaggctgatgaatattcggataagactgctttggtactagaaaactcttcaatgtgttacgcagaacttaatcaccgtgcgaaccagctggcacggtatcttcaggagtgcggagtaaaacggggagaccttgtcggaattgctttagaacgctcttttgatttgtatattagtattctggcaatattaaagtcaggcggtgcttatgtgccgttagaccctcaatatccgaagcaaagactatcattcttaatcgaagattcaggtgtagagttgctgattacaaacgaaagcattcagtcacaactcccgcctcacggggacggcgtaatctgtttggatggtatgaaagaagaaattgaaaagatggatggatctaatattggcataaaaggttccttggatgacctggcttatgtcatgtatacgtcaggctcaacgggactgcctaaaggagtaagtattgttaaccgcggtgtgattcggctggtgaaggagactgattatgcggtatttgatgagaatcaaacgtttctgcaattagcttctgctgcttttgacgcttctaccttcgagatctggggctgtttattgaatgggggatgtctggctataatgcctccgggaataccgacggctgatgatattgcagaagctgtgaaaaaatataacattacgactctttggctgacggccggtttattttctctagtagttgatcagcagttagaatcattaaaaggacttcagcaattattagtaggcggagatgtggtttccgttccgcatgttcaaaaagtattagcgcttggaaaggtacaagtaattaacggatatgggccgacagagggaacgacctttacctgttgtttcccggtccctcatgattggaaaggcagtatgcttcctatagggaggcctatttctggtacagaaatattcattttagattcgcaattaaaaccggtagcgccgggaattcctggtgagctgtttattggcggagatgggctggcgcgagagtattggcgacggcctgatttaacgaaggaacggtttatatcacaccctttcaataatgatccttcagcacgtctttataaaacaggagacttagtgcgttatttagaaaatggcgatgtggagtttattggacggcgggacgagcaagtcaaaatccgcggttttagaatcgagcttggggagatagaagcccgattgatcaatcatacagaaattaaagaagcggcagtaacagtaaatcataatggtgatgaagatttatatatctgtgcttattacacttcaaatcataaaatcgcaaagattgaattgcagcactttctgagagactttcttccggaatatatgattccatcgtacttcaaacaaatggaaaacatgcctttgacggtaaatgggaaaattgacagacgggcacttcctagacctgatatatctcaaatgtccgaaacaaaatatgaagcgccgacaaatgaaacggagaaaaaactttcggagatttgggaagctgtacttggcagggaacgcgtcggtatagatgagaatttctttgaaaccggcggtcattcactaaaggcttctatgttaatttcccgcatcagaaaaattttcggtacggatataaaggtgaaggagctttttgaacagcctaccatcaaacagctgagccgtcttattcaaaagcgggataaacagaattatccggtcatcagtaaagcgaggaagcagtcttattatcaagcatcatctgctcagaaaagaatgtttgccctttgggagacggataaagacagtatcgtttataacttgccgattatgatcgaactaaatggaaaattagatgtaaaaaaagccgaatcagttttacaagagattattggcagacacgaagcgttacggacaagtttcgatgttgtaagcggcgatgtggttcagattattcacgatacatgggagctcgaatttgattatcagaagctgccgtctaatgggatacgaccatatgtgaagcagtttatcagaccctttcatttggacaaagcaccgttaatcagagccggactcataacgtatgaagaccggaatctgctgctgctggatgttcatcatatcgctgcggacggtgtatcggttggaataatccgcaaagaattcaatgcgctgtatgcgggtcataaactaaaacagccgccgctgcaatataaagattattcagaatggcaagtaagctcaggaacaaaagaggcgttaaaggaacaagaggagtattggcttaagcggttaagcggagatctgccgattctcaatctgcagactgattatgagcggccgagagtcaaaagctttgaaggaagccgaatcagctttatggccgatgaaaggttaacatcaagcttaaagtcggtggcgaaagaaacaggaacaactttgtacatggtgctgctggcggtatataatgtcatgctttcaaaatacagcggccagcaggatgtgatcatcggaacagcagagtccggaaggtcagacaccgaactggagaatacggtggggatgttcgtcaataccgtcgccataagaaattttcctgaggaacataaaacattcagagcgtttttagaagaggtcaaacatcatacgttaaaagattttgagaatacagattaccaatttgaaaatattgttcaaaaactcggggtaaaaagagattcgagccggaacccgctgtttgatgtcatgtttacttttgagagtaaggattacggattcggaggaaatgaagagacagcagaatcaaatttactagtatctgaggtcaatatatcaagatttgatttaacgttaactgcaatggaaaccgataaaggcgttaacttccaattggaatattgcaatcatttattcaggaaagacacagtcgaaagaatgggtgctcattatacccagcttttacaacaggttgtatcagaaccggacacggcaatctgcagactgaatatgataacggatgatgagaaacataaactgctttatgtattcaatgatacagcagccgacttcccgcataataagacaatccatcaattgtttgaagaacaagcggaaaagacaccggaaagaatagcggcagtgtatgaaaataataaagtaacttataaagaacttaacgaaagatcaaatagtctggcgagaacactaatgaaaatgggggtgaaaaaagagtcaatagtaggtattgttgctgacaaatcattagagatggtgttaggcatattgggtgtgctgaaggcgggaggcgcatttttgccaattgatccgggatatccttctgagagaatcaaatacatgattgaagacagcggttctgacattttattagtgcagaatagtcaggctgataatatcccgtttgacgggaaggttattgatttaacagatagttctctttactccggagatcggcataacctgccaatgatgagttccgcagaacatcttgcttatgtcatttatacttctggaacgactggaaaaccaaagggtgtaacgatccggcatatcggaatcagtaatctcaaaagtgtctttgaacatgatatgaatatcaattaccgggataaaattattcaatttgcaagtttttcatttgatgcatcagtgtgggaaatcagtatggcactgttgaccggagcggaactacacatcctttcaagtcaagtcatcaataattatacattatttgaagagtatattaaccggcatgacattactgtagccactttgccgcccgtatacatcaaccatataaatataaacggattatcagctttaaggctcttaattactgctggttctcagatatctacaaaaaccttgaaccggatcgtgaataaaatagactatattaatgcctacggtccaactgaaacgacaatctgctctacaatgtggagatactcagaagctgagagggcgatggcaaagaccattcctatcggtaagccgatcagaaatctgaaagccttcataattgatcacaacaacaatcttgtgcctattggtttagcgggagaattgtgtgtgtcgggtgacagcttagcaagaggatatctcaataaagagaaaatgacgcgtgagaagtttattgatcatccatttgagtccggaactaaaatgtaccgaacaggagacttggcaaggtggcttcctgacggaaacatagaatttttggggagaattgataatcaagtcaaaatcagaggcttccggattgaaactgatgaaatagaaagccagcttctgaaaataagcgggataaaagaagcagttgttatagataagtgcgaccttcacggtgacaaatacctttctgcttttgtaaccgcagaatataaaatatccggagcagctttgagggagcaattgggtgacattttgccgcaatatatgattcccggtgtcatcatccaggttgaacagctgcctctcacaccaaatgggaaaattgacaggaaagcacttgctgaaatagaagagcctaaacatataaaggagcaccttgaagcaccccgttccgaagtcgaacagattctggtaaatgtttggtcggaagttctgaaaattgatgatattggtattaatgataattactatgagctgggcggagactcaataaaatctatactgattgtatcaaagcttcaaaaatacagtctcagtctagaggtaaaagatcttttgcagtatccgcaaataaaaaacctcagtaaacacgtgaaattatataaagctcaaacagatcagagcccggttagcgggagaactgaactggcaccgatacaaaagtggtttatagagaatgactttgcggacatacaccactttaatcaggcattcatgtttcaaatgaaagaaaaaataaatgaacacgctctggcaaagacatttgaattattagtaaagcatcatgatgctttgaggttgatatatacagccgaaaatgacgaaataaaacaagaagtcagagatgtccaagccgcccgggatacttttactctggacatatatgatctgcttgctgatacggattacaaaaatacaatagaaaaacttgccgatcagttacaaagcggaatggatcttgaaaaagggcttttaatgaaacttggtttatttcgaacaatgaggggcgattatctacttattgctatacatcatatggtgattgacggagtctcttggagaattctgcttgaagatatggagcaggtctacaacaatctgcaaaaaggagagccggccgttcttccgccgaaaacggcatcctttcaagaatggacacgtaaattggcggaatatgcaaacggaagtgagataagaaaggaacttcggtattgggagaatatcgaaaaaacgaagattaaagaaattccgagagatttcaataaaactgacagtgtatataaggaaagccgcaccattactgtcagtcttacaaagcagttaacttataagctccagaggaatacaaatgcagcttataacacacagattaatgacatcttgctttgttcactgggaatggcagtaaaagaatggacgggacttgacaaggttttaatcggtctggaaggccacggaagagagaacatattagaaaacatttcaatagaaagaaccatcggctggttcacctcactatttccgatcgtgctggatatggagcacagtgatgatctgccttattgcataaaaaatacgaaagagtatttaagaagaatacctcataaaggtattggttacggaattattaaatacttgacggcacgggaacataaaaaagacatcagttttacgataaagcccgagatcgggtttaactatctgggagaaatctctcaaaaaaagcgggctgtttttcagcatgcagatatatcatctggtacaagtgtttctttatctaataaaaaattgaatgccatcgaaatcaacagctttattatggacggtcaactgcagttggaatttaactatagtacgaaagagtttaaagaagaaacaattaagacattaaccgaatcctatataaaccggttaatcgatattattcagcattgcgaaatgaaaaaaattcctgaaaaaacaccctttgactatggagatctggatttatccattggagatttggagcagattttatcaagcggaaaagagatagagaaaatccactccctgactcctatgcagagcgggatgctttatcatgcattgcttgatccgttttcacaagcctattttgaacagcttacattttctttatccggtcagcttgatattggcagattaaatacagcttttaatatgctgatcgagaagtatgaaatattaagaacatgcttttttcatgaaggactaagtaagtttaaacaggctgttctaagagagagaaaagttaaaattgaatttgaagatatcagcactttctcggaatatcaaaagaaagtccggcttaaagatgtccagtttaaagacaggggaacgagattcgatttgacgaatgattgcttaataagagtaaccgtattaaaaactgatgagaaagaatataaactgctgttcagttttcaccatattattatggatggctggtgtatgagtttaataatgaatgatataaaaactatttatacgtcattaaaagaaggaagagagacagtgcttcagcataccgagccttacagcacctacttagaatggctggataatcaggacaaaagtgccgcattagaatattggggggattatctaaatgaatatgagcagcaagccggtattccaaagttctgctgatgagggcggtttcaataataggaagaaaacattcattattgatgaaacatgtacttcgatgttgaaagctgcagctgatcaatatcacattactttaagtgcattgattcagactgcatggggagttcttttgcagaagtataacaacgtgaatgatgttgtgtttggtgcggttatttccggaagacaatgcagagtgcaaggcatagaaaaaatggtggggttatttatcaatgcggttcctctgagagtaaaaggcgatggtgatacggtatttatagcattagcccaaaagctgaacagtgactttatcaaagcgaatacatcatacggttacagttctttagcggatatacaagctcttacaaagatgaaagagaaactgatcaaccatatgctggtttatgaaaattaccctgttgatgactatggcaaggcggtcgatgatacaactgatgctttaaggattacagatatggaagtgtttgaacagacgaactatgactttgggctggttattattccaggcagccaaatcaaagcagagatgacgtataacaataatgtttatcgtgaagatatcattaatcgtataggtgttaatttctgtcatgtattaaagcaagtggcaactgatcctacgcgtgtcctgaaagacatcagcgctgtaaatgaagaagagcgcggaatgctccaggagtttaataagcagtcctctaattataccgtgaataaaacgatacaagacctttttgaagaacgagcggaaaagacacctgaccaaacagcggctgtctatgcaggaaagcatatcacttataaagagctaaacgaaaaggctaatcaagttgcaacattattaatggaaaaaggggcaggaaaaaacagcattacggctatgatgatccgtccttcagaatattcaatgattgggatactgggaattttaaaaaccggaagtgcgtttctgcctattgatgatgaatcaccggtcagtcggataaatcatattttaaaagatagcaaagctgatatcctcattacagatttgtgctttttagctgataaaaacattgcggcggaatgtttggatattacggataaatcgatttataccagccaaaatacatcaaaccctgatgttcagtatgatctcgaggacgaggtatatgttatatatacctcgggtacttcgggaaaaccgaagggggtgaaggtgaaaaataaatcattagttaattattcattatgggtatgtgatcaaataaacataaattctgacagcaggtcgttagtgacgtcaaaatatagttttgacttatgctataccagtatatttccggttttatccggtggcggacaagtccactttgttgataaagaagtgtatcttcactctctatcattaatagaatatattcataaaaatagtattacatatcttaaaatgacacctactttattttcaacattgatggaggatgttgacatgctggcgtcttgtcctgatttaaaagttatcatactgggcggcgaaagcataaacatcggcaacgtcaaaaagctcgctgaaaaatgcagatggatgaagtttattaaccattacgggccgaccgaaagcactgttggctgtattgcacatagcattgatctagatcatattcaaaactgtgaaatatacaataaaataggaagaccaattcacggcattaatatctatattgtggatcgttcagatcaactggtccctgtgggagcacccggtgagatttgtatcagcggggtaggtttagcatcgggatatgtcaataatgaagaattaacgaatgaaaaatttattgataatccttttcatcccggagcaaaaatgtacaaaacaggagaccttggcagatggatgccggatggaaatatagaatttttaggccggattgacaaccagatcaaaatcaggggttttagagttgaaatcggtgagatcgaaaaccaactattacagctggaaggtataaaagaagccgcggttgtttatatagaggagaaatatctttctgcatatattactggggacattgagatggaaggctcgttcgtacaggagaaattggcacaggctcttccgaagtatatgattccgagtttcataatacaactgaaagagctgcctcttacagctaacggaaaaatcaatcgaaaagaactgcctcttcctgacttgcaacggttgtcagtacctcgatacgaagctccggcaaatgaaacggaagaaaaactagctgaaatttggaaagaaatgcttgggcataaacggatcagtataaatgaagatttcttcgaactgggcggacattctttaacagctgcgttcactatttcccgcatcagaaaaactttcggtacggatataaaggtgaaggagctttttgaacagcctaccatcaaacagctgagccgtcttattcaaaagcgggataaacagaattatccggtcatcagtaaagcgaggaagcagtcttattatcaagcatcatctgctcagaaaagaatgtttgccctttgggagacggataaagacagtatcgtttataacttgccgattatgatcgaactaaat

SEQ ID NO: 10 - DNA, 55394 bp, Bacillus subtilis
cttacaggcaggttacccacgtgttactcacccgtccgccgctaacatcagggagcaagctcccatctgtccgctcgacttgcatgtattaggcacgccgccagcgttcgtcctgagccaggatcaaactctccgataaagtagtttgactgactacgcacatcgctgtgcgatttatttaaaactttgaattaacaggtacgttttgtcttgtttagttttcaaagatcattttgtctttcgttcaagcgactttattattatatcttatcaatctcttgaagtcaacaactttttaaatttcttttttcgtcagcgccttgtttagcggcaacgaataataatataccacctcacaaataatagtgcaatagttttttaaaagaaaatcaaaaaagttttacgagcggcttgtttctaaaaaagcgccgtactgcgataagcagaaacggcgccttcccttttattatcgttgtctcatttgagggaataataaaacgtctctgatagatggagcatttgttaacagcatgacaaggcggtcgataccgatacccaatcccccggtcggcggcatgccgtattcaagagcttcaacgaagtcttcatccatcatatgcgcttcatcgtttccttcttctctttcttttaactgcgcttcaaagcgttccctctggtcaatagggtcattcagctccgtaaacgcattagcgtgctcacggccgacgataaacagttcaaaacggtctgtaaagcgagggtcctccggatttttcttagcgagaggagaaatctctacagggtggccgtaaataaatgtaggctgaatgagtgtttcttcaattttttgttcgaagaattcattgatgatatgccccaccgtcattgagtttgtgatctcgataccatgctcttttgcatgaccgcgcgcttcttcaacagtcatctcattccagaaatctacacctgtcgcttctttgaccgcatctaccatgtggagtcgtttccactcaggtttcagatcaatctgctcttcgccgtactggattgtggtgcttccaagcacttcctgcgcaatatgtgcaacgaggttttccgtaaggctcataatatctttataatcggcgtacgcttcatacagctcgatcatcgtgaattcagggttatggcgtgtagaaacaccttcattacggaacacgcggccgatttcgtagactttttccaatccgccgacaatcaggcgtttcaggtgcagttcaatcgcaatacgcatataaagaggcatatcgagcgcgttatggtgcgtgatgaacgggcgtgcagacgctcctcccggtatgctgtgcatcgtaggtgtttcaacttctaagtatccatggtcatctaagtatcttctcgtcgcttggatgattttgctgcgtgtgataaacgtttgtttgctgtcagggtttacgatgagatcgagatagcgctggcggtaacgctgttcaacgtcttttaacccatgatatttatcaggaagaggacgcagtgcttttgtcagcagttcaaaagatgtcgctttgacagaaagctcgcctacgtttgttttgaaaactttccccgtgatgccgataacgtctccgaggtctgaagatttaaagatttcatattgttgttcgccgacactgtcttttcttacgtaaatttgaatttgaccttctaagtcctgcagatgcgcaaagccggctttcccttttccgcgctttgtcatcatacggcctgcaatggtcacttcgatcgctttttcttccagttcttctttagaaagctcctggtaggcgtcaatgatctgttgagattgatgcgttctctcgaaacgttcgccgaaagggtcaatgccgttttctctcagctggttcattttatctcgtctgacttgcagctggtcgttcaattcctcatgattttgctcttcttgactcattggtatcactccgttacattttgatttcacgaaaaagcagaaaaactgccagcggtaagctggcagtgagcagcaatagagggtgtatattaacctacttttgcatcttgaagctcttttgcctctgcttcggcggtaaatgcatctaaaagctgcacaacttcttcacgcgtctcacattggttaatttcgttgcgtacattcgcattgcctctgacacctttcagataccaggcagcgtgttttctcatttctctgactgccacattttcgccttttaacttaatcaggcggtctaagtgcagtttgcataccgacattttttcacggactttcggttcgtcttttaactcgccggtttcaaggtagtgcaccgtacggtaaatcatccacgggttgccgagtgcggcccggccgatcatgacgccgtcaactcctgtttcctcaagcatgcgtttcgcgtcctgaggcgttttgacatcaccgtttccgatgacgggaatggagacggattgcttcacttctttaatgatatcccagttcgcagtgccttcatacatttgcactcttgtgcggccgtgcagggcaacggcttttccgccggcacgttcaacggcttgggcatttttcaccgcataaatgtgctcttcatcccagcccattctcatcttcactgtaaccggcttatcaacagcatctactactgcggataccatttcataaatcttatcgggatcgagaagccatttggcgcccgcgtcacattttgtaatcttgggtacgggacatcccatgttaatatcaataatatcagcagtcgtgttttgatctacaaacttcgccgcttccacaagggtttccttttttcctccaaaaatctgaaggctgagcggtttttcacgttcatcaatgtaaagcatccccattgttctggcgttattgtaaagaatcgctttgtcactgaccatttcagcgcataccaatccggctccgaattcctttacagtcaatctgaacgctgagttgcagacaccggccataggcgcaagcacaacccggtttttcaattgaatatcaccgattttaaacatttttcccctcctttcatttgtctatttttcaggcggggccaattcgtccgcacttatatttaaaacatctgccgcatcttgaatgatggcatctgatggcaatcggtttccgcgttcaatttcaccgacaatagaaactgatatacctaatgcttttgcaaatccttcttgagtataacctttcagctttctgaatgcacgaattcgcctaccccagatttctgcttccatactcttacaccttcttggtttgtttcagcgcttatcgtgatatgatccgcctgcgggcatatttcttttaacggcgcaaggacaaataagcgctcatacattctcggatgcggaacaatcagccgctctgtttcaatattttcacgattatacagcaaaatgtcaaggtctgccgtccgcggtccccagcgaatctctctcgttctgcctaattcagcttcaatgctctgcgttacatcaagaagttcaaaaggagataacgacgttttcacttcaaccgccatattgagaaactgatcttgatcctcatagccgacgggatctgtttcatatatggaggacacctttgacaccgtcacgccatgatgccggctgagcatggccactgcctgacgcaaataatgttcacggtcgcccatattggagccgaggccgatatatgccgtattgttcatgatttctttctcgtcatttctatggctactgatttataatggccgggaatcggcgggtcaggcttaacaacctttaccgtacattgctgcaccggctcaaatttctcaaggacggtgtctgcgatccgttccgcaagggtctcgaccaaattaacgggctcgccctcaacgatgccgcggcagacactgtacaattccgcatagttaatggtataagagaggtcatccgtttttcccgctttgctcaaatccagttcggcagtcaggtctactttgaagcgctggccgagtttgttttcttcttcgaacacgccgtgatatccgtaaaactccataccttccacatatactttatccataatgtacgcctcctttgttcaacatagcatccatcatcttcgtcattcttgcgatctctttgacatcgtgcaccctcacaatatcgcagcctttttggacgccaaggcatactgtcgctcccgttccctcagcacgttcttcagggggaaggtcaagcacacggccgatgaacctttttctcgatgtcgccaggagcagcggataacctaacccgctgaacacctccagcttgttcatgacagccagattgtcctcatagtttttcgcaaagccgatccccggatccagaatcatgttttcatctgtgacgccggcttccgcggcaatttttacgctttccatcaagtctgcaagcatatcaggaataagatcgttgtagtttctttccatgcgattatgcattaagataatcggaaccccgtgtgcggcggctactgacgccatgtcagggtcacctttcgccccccagatgtcattaaggatagaggctcccgccttgaccgcttcgtctgccacggacgctttgtacgtatcgattgaaagcggaatgtccagctcgcttgtgatccgctctatgactgggatgactcgtgacatttcctcatcagccgacacgagtgatgcgccgggtcttgtcgattcgccgccgatatctatgatatgcgccccttcttcagccatcttcgccgcatgcagaagcgccctttccgtactgtcgtatttaccgccgtcagagaaggagtctggcgttacatttaatatccccataacgagcgtcttctctttataggacagagcgcctttttttgtatgaatcagtttaggctgttcaattgtttgctgcgccattttgttcctcctcctgtacattcgttttgtttatttcctgctgatactgcttacggagcaattgcaccgtttttccgctcactccgggcagcggcacttcctctattttagaaaacggaatgatttcaagcacggagtttgtcaaccatgcttcatccgcttcaagcattgattgaaaacggaatcggccttcggtgacttctgtcccctgccgtttcaattcatcaatgacaaactgtctcgttacaccatcgagaattcccgtatccaaggatggcgtaaagaccttgtctccttttcgccaaaacacgttggagacaatgccttccgcgacatctccttctccggtcaggaaaatgccttcaagattgggatcattcccgatctcccgtttagcatacatgttgtttaaatagtgatgggattttaaccgaaaagttccttcaggcgtatttctcctgatagagagaagcctgccttctttttgaacaggcagagtttccggattgagccggttgacgaaacaaaggacggtcggcttttcataagtctgcgcggcaaatcccttatcgctgacgcctgccgagatgttaagccggacacgcgcgctgccgtccttgatgtcattgaggagcaacagtctccgaagcatatcaagcagctcctgtttgttcacctcatatgcaatctgcagatcccgaagcgccctgttgagcctggcgacatgcgcatccggcagaaacggccggccgctgtaaagcctgaacgtctcgaacgcgccgatcccgtacagataaccatggtcaaaaggagaaagcgccgcttctttctcctctatatattgaccattcaaatatataatcacaccgtcacttcctttttgcggtgtgtctctataaagtttctgagcatctctttgccgaaggaggtcatgatggattccggatggaactgaacaccttcaacaggcagctcattatggcggattgccataatttctccttctttggtttgagcggataccgtaaaacaatccggcagcgtgtccgctttgacaataagtgaatggtaccgggtggcgacaagcggattttgcaggcctttaaaaatcgtctgtccgtcatgcataacttctgacgttttgccgtgcatgagccgctccgctctgacgacgtcgccgccgaatacttgcgcaatcgactgatgtccgagacatacgccgaaaataggaatactgccggcaaaatgtttgatcgcttcgaggctgatccccgcttcatcaggactgcacggcccgggtgaaatcattaagaagtccggacccagctcttcaatctgctcaatcgtaatctcgtcattccgtctgacgatcagttcctccccgagttcacccaaatattgaaccaagttgtacgtaaatgaatcataattgtcaatcattaaaatcatctctgctcacctcgtctaattttttgtctcttcttcgctcagctctaacgcctttttcatcgcaaaagcttttttgaacgattccttgtattcatgcttcggaaccgaatcaatgactactcctgctccggactgcatgaaagcatgtccgccggctgcatagatcgtccggatcacaatgttaaactgcaaatctccgttgaatccgaaccagcctatagatccagtataaagcccccgtcttgtcggctcaagctcttctataatttccatcgttctcactttgggcgctcccgtgatggtgccccccgggaacaccgcatgaataatgtctgtcgcgtcatatccgtcctgcagctctccctgtacgtttgacacgatatgcatgacgtgggaatacttttcgatcgccataaattcgttaacccgcacggagccgtagcgcgatacgcgcccgaggtcattgcgctcaagatcaacaagcatgacgtgttccgcacgttctttttcgttgtgaattaattcatcagccaaagccttgtcttcagcatcgtcttttcctcttgaacgcgtacccgcgatcggtctcgtttcaagcttcttccccttctttgtcaccaatagctccggcgacccgcatatcacttgaaaccccggtgtctcgagataggccatgtaaggagacggattgacgtttctcaagtgtttatacacctcatacggatgaacggataaggactgagactgcctgatggacaaattaacctggaacacatcgccgctcgcgatatattgtttaatttgttctacagcctgtgaaaatccttcctcagtgaacggtgcggcgtacgatccgtccccattccgattcagcggtgaaaaaggctcgtccgccgtttggagggaacaccacatgtcctctaagcgggacagcttttcttccgcaagatccgcttcttccgcttcagtatgggtaatgagccataacgcctcttcctcatggtcataaacggccacatcatcaaaaacaagaaagtaaatatcaggtgtttccagatcatctaacgacagcatcttaaaattctcaatatatcgggcgtagtcgtaactgataaaaccaatcgcaccgccctgaaagtccggaaacccaacgtttgtttccgttccgagcgttccaaaccattcatgaaaggcccgcagcgggtcaccttctttaaacagtgtttccccctcatgcttgatcgttgtaattccgtctttccctctgacggacgcaatcggatctagaccggctatactgaatcttccccctctcgcgctttcgagcagaacatgccgttttctcgatttcgaaaggttttcatatcgctgtaaaaatgcttgtttcgtaaaaggtatttttcttcctgccggtctgcgttgtgccatcatatcaatcctctgcttcgttttactgtagttttattttaaagcaatcacactggtgaaaaaagtgaatttcacttccaaccataaaattcgaaacgttttttggatttccgatgcttcaggcacaaaaaaactcccggatacagccgggagccgtgtatatgtctctattcaaactgataaagcggtgtgcttaagtaacgttctccgttactagggatgatcgcaagcactttcttgcctttccccagttttttcgcgatttccagtgccgcgtaaatggccgctccggaagaaatgccgccgagaatcccttcttcttttgccgttttacgggcatattcaaatgcatcctcgtttttgacgggaatgatctgatcatagatgtccgtattcaatgtttcagggacaaatcccgctccgataccctgaattttatgagggcccggttttccgccggaaagaaccggagaatccgccggctctaccgcatagattttgatggatggatatgcttctttcagcacttcgcccgctcccgtgatggttccgccggtaccgattccggccacgaacgcatcaagctggtcgtcaccaaactgttctacgatttctttccctgtcgtttggcgatgaatttccgggtttgccgcattgttgaattgctgaggcacaaagtatccgtgttcctcggcaagttcttccgcctttttaatggcacccttcattccttctgcgccgggagtcagcacaagctccgctccgtatgcgcgcagcagattgcgtcgctccatactcattgtatcaggcataacgagaatggctctgagacctttagccgctgccaccatagcaagaccgatccctgtatttccgcttgtcggttcaatgattgtgtcgccggcttttaattttccttctttttcagccgcttcaatcatcgccactccgatacggtcttttacgctgctgcccggattcatgtattcaagcttcagatatacatctgcactgttttcatccgtcaggcgattcaatttcacaataggagtatttccgattagttcagtaatagaatttgcaatacgcaccatgttggacacctcaatttccgactaaatttattggtattataaatataagttatcaatttcaaaattttttgtcaatcatttagttcttttttccccgtagaaccaagagacccccgcctctttccacagcgttttgactgtcgccttgtcacctaattgatccatcgcgatctggcgtctgatttggctcttcacttcattgtatgagaaagttctcgatttaagcttttctttcagctgaatgacggcgtatcctgaagaaactttaatcggttcagcggaccattcatcttctttaagacttttagcttctgtgatatatgcctgcgggatattttcctggttttctgtcacaaagccgaggtctccgccatactgagacgtatatctgtccgtggaacgttcagcggcgacggcttcaaagctggaaccgcctttcaaatcagcaagcaccctgtccgcctcatctttgtttttgacgacaatgtgccggattctgtaggaatcatcgaaatggtacaattctttatttttattataaaatgattgcatttccttatccgatatatcgatgtccttcgtcagcagttcttcaagaagaatgttgtagcggatctggtctctccattctttttcggtaatatggctgtcttcataaaatgaattatctaccgctttgattaaaagaaattcccgctccaattcgctgtttgaaactgtaagtttattctttttcgcaagctcttccactacttccgcattaatcatgtcttccagagttgattttccgtactggtcttccatctttttcatccagtcttgccgtgtgatatgtttatcaccgattgtcgcgatggattcttcagatgaccccgcggcttgggattttgttaacttatacgccactgtcacactgcatactaacagcgccgctacaataatcgtcaaaagtgttctcgatttcaaaatctaccccatcccttttataaaatagaacaacccgctaaagagctagcgggttgtttcgtcacgaagctcttccagttcttcttttgtaaataaatatttctcattacaaaaatggcaaaccgcttcggcttttccgtcttcttctatcatatcttgtatttcttttttgcctagtcctaaaatggccgtttcgaatcgatcttttgaacaagaacagtgaaatttgaccggcattgtttcgagaacgtccggtttttgacccagaacttcttctaagatttcttccggtgtcaggcctttttgaatcaattttgaaatcggttcgatttgagataattgcttttcaattgttgaaatggtttcttcatcagtccccggaagaagctgaatgatgaatccgcccgcagcgagaatcgtgttatcaggatttactagaacacctacgccgacagatgaagggacttgttcagaagaaacaaggtaatacgtgaagtcatcaccgagttcacccgagacaatctctacttgtcccgtaaaataatcacgcaagcccaaatcttttacgacactgagtgttccgtcagttccgaccgcccgtctgacatccagtttcccttgttcattgaggtcaaaatgaacgtgcgggtttgatacgtatgctcttacctcaccctttgcgttcgcatctgcgacaatggctccgatcgggccgccgccttctattttgactgtcagcttatcttcacccttaagcatcgctcctagcatcagagaagctgtcatcgtccggccgattgcggctgatgccgtcggccacgtgtcatgccttctttgcgcttcgttaaccatatctgtcgttctggctgcataagcccgcactttaccgtcatatgcaattgctttaattaaataatccatcgtttacctcctatacgtgacccacgcgatttcgctcataaatgatttccagccctttcagagtgagaaacgggtcaacaatatcaatacagtctgattcgtttgcgattaatgacgcaagcccgcctgtcgcaatgactttcggttcctgtgttgcctgccatttcatccgcttcactataccttcaacttgtccgacatagccgaaaaggatgccggactgcatagcgcttaccgtgtttttgccgatgatattgtccggacgggcaatttcaattcttggaagcttcgccgcacgtgagtacagcgcttccgtcgaaatcgtaatgccgggagcaatcgcgccgcccatgtattgtttgttttcatcaatgtagcaatacgtcgtcgccgttccgaaatccacaacaattaaggggcctccatactgctggatcgccgcaacggcattgacgatcctgtcagctcccacttctttcggattgtcatactttatatttaaacctgttttcattcccgggccgacaacttgcggctcgatgtgaaagtattttgtgcacattctttctaaagaaaacataatcggcggcaccacggatgagatgataatcccttcaatctgttcaaacatgagtccggaatgttcaaataaggagcggagcagcatgccgaattcgtcttctgttttgtgcctgctcgtttctatgcgccaatgatattctaattccccatcatgatatacaccaatcacggtgttggtgttccccacatctataaccagtaacaacctctatcaccacttttgaatagtttctaatcataacattttcaacattctacaataccatacacgatctgcggctcttttgtaaacaaaacgaaaccagtaaaaaaaccgccggtatacgccggcggttttcatatcagaaagcgaactattctttcggctcgtctttcttttcgtcttctgttttagacaggatgtttactttcacatcgtctttttgaagatggtcatctgagaaattgcgctcagggagttttccgtgatccacgagatgcttgatttgttccgcatctaatgtttccacatcaagcaatgtctgagcaatcaattcaagcttatcgcgattttcagtcaggatggttttcgcacgctcataacattctttaatgatgcgctgaatttcctgatcgatttcgtaagcgatctgatcactgtagttttgctcgttgttgaaatcccggcccaagaatacttgaccgccttgagattgaccgaactgaagcggtccgagtttttctgacataccgaactctgtcaccattcttctggcaatgttcgttgcccgctggaagtcattgtgagcgcccgtgctgacttcaccgaagataatttcctcggcaacgcgtccgcccagaagaccgacaattttatcgagaagttcaggttttgtctggaagtaacggtcttctctcggaagcatgaccgcgtatccgccagcctgccccctcggaacgatcgttactttatgaaccatatcggcttcatccagcacaagtccgataacggtatgaccgccctcgtggtacgccacgatattgcgttcttttttcgatatgacgcggctcttcttcgcaggacccgcaatgacacggtccgttgcttcatcaatgtcgcgcatatcaattttcttcttgttttgacgggcagcaacgagtgccgcttcgttaagaaggttttctaaatctgcgcctgagaaaccgggtgttcttgaagcgattgcttttaagttcaccgtttcatcaagcggtttgtttctcgcatgcacctgtaatacggcttcacggccgatgacatccggacggtctaccgtaatctgacggtcaaaacgtcccggacggagcaatgcagggtcaagaatgtccgcacggtttgtcgcagcgataataatgattccttcattcgcactgaaaccgtccatctcaacaagcagctggttcagcgtctgttcgcgttcatcatgcccgccgccaagacctgcgccgcgctgacgtcccaccgcgtcgatctcatcaatgaagatcagacaaggtgcattctttttcgcattttcgaataaatcacgcacacgggaagcaccgacaccgacaaacatttcaacgaagtcagatccgctgatgctgaagaaaggaacgcccgcttcaccggctgaggctctcgcaagcagcgtcttaccggttcccggaggtccgactaacagcacgcctttagggattcgggcgccaagctcggcgaatttgcgaggatctttcagaaactcaacaacctcaacaagctcctgcttctcctcatccgcgccggctacatctttaaacttcacgcgtttcttttcttccgtatacagcttcgctttgctctttccgaagttcatgacacggctgccgccgccctgagcctgattgagcaggaagaaaaacagaataaagatgatgacaaacggaatgatcgtcgttaagaacgtcacccacccgcttgtttcctgtgcgggatcaacttttacgtccgtctttttaattgcgtcaaatatctggtctgctccttttccttcaggaacatgtgttaaaaagtactggtctttgtcgtattttttcagctgtccttttacctcataaacacctctgacaggctgaaccgatacgctatcaactttcccttcatcgaggttcttgataaacgtactgtacgacatattttctgtcttcgggtttgaagtctggaagtaacttacaaccccgattactactaataaaataagtaaataaaaaatggtattacggaagacccgattcattccttacctcctcccacagtaagcacaactatgttcaatagtaccatagaaaatcattccaatacaaccgataaccatctcggaagcaggcagccgatcagctttcataaatcgccggttttagtactccgatgtaaggcagattgcgatagcgttcggcataatcaagtccgtaacccacaacaaacgcgtcaggaacttcaaagcctacgaagtctgctttaatgtccgcttttcttccgcttggtttatccaacagggtaacaatcttaattgatttcgctttacgatatcggaagagttctacgagatagctcaaggttaacccactgtcgataatatcttcaatgattaagatgtcccggccttctacagatgtatccaaatctttgatgattttgacttctccggaagaaaccgtggaatttccgtagcttgatacatccatgaagtccatttccaaatatgtatcaatatgctttataagatcagccataaaaggaagcgctccctttaacacaccgattgccaacggaaacgtgtcgctgtactcgcttgttaattgttctccaagctgttttactttctgctggatctcatcttctgagatcagcactttttcgatatcctgtttcatgttaatgcttgccccctacacttttcatgctgtctatattgtaatacaatgcggtcactgtttgaaatcacaagatcgtcaaagatggattttttcaagccaggcagccagataatttcaccgctcgcatccgttacaatcggccattcgtcccgatcccgcagaggcagtttatgatcaataaatatatctttcacctttttcgagccattcatccctttaagtttgatccggtcaccgatttttctcgtccggattgttaaaggaaattgcaccttgtttctgcttgtcataaaaacagcattcccatttttgatatgagggtcagcctgatcggccacctctatcataaagccgttggggagaacagcagtctcgccttccgctccttgcagctgcagctcaaagggaattttttcacattgccattgttcaaatgtaaacaaacatgtctgatatgatttgaccaccttcagccctttcggaaaatcaagcactcccgaggcgcttccattttccgcccattcgagaaactgctgtatgtggcgggcggaaaacgacgatggaacgttttcataaagatagtttaatattagttgaactcctcttctttgtaaaggtatcggaagggcaagcaattgagaggaattgacttcaaccgatgtgtcagacttgcttgtaataaccttattcattcgttctttcgttaatgactgcaggtattgttcgtcttctgtcagtgcttcactcaccttttgaaacattttatgaacgtcaggtgattcatgttttaaaaaaggaagcacggtctttctgaatctgtttcttgtataatcgtcttttgcattgctctcatccgttctgtagctgagcccttcttgacggcagtattcaaggatttcatcctttgccgcaaagaggaaaggcctgatcagccagccggatgcaaattcgcggacgggctgcattcccgcaagccctgccccgagcgtacctttcgcaagcctcatgagcattgtctcaacctggtcatcgccatgatgagccagcgccaaaaacttcgcttggtgttttgtcatcagatcttcgaaaaactgatatctgcaatcacgcgcggcagcctgcttgttcagcttattcttctttgcgtatgcagaaacatcaatctgtaccgtttcgcagaggatatgttccgcttcgcaatatgactgcacaaacttcatatcttcttcagattcaggacccctgaactgatggtcgacatgcgccgctatgataacggaagaatgcccaaagtgcttattcagcatactgagaagcgccattgaatcagggcctccggagaccccggcaataatcgtttctccctccgcctgaagatgatatgttttgaaaaaatcttccacgcttttcacaatgtccccctcacaatgagcaggttttttaaagatatacatatcctatcactttcattccctccaagcaaagaagaagcatgagcgcaggcgtccggccggcactagataagaaaaaagacgatgtaagcgaaataaagggcgagaacgctgattaaaataagtgttgtttcaaacaaaccattgtgctttgcgggtttttgtttaggtttataccgcgtttgagatacagtgccctgccgcggttttgattgcggcggcttaggcttggcggcggctttccttttgctcccggcactctgccccgccgtcaggatgtcatgcttcatggcttccgcagacggatattggccgtttaaagcagaaaacagaaccttcttatacttattcagaaacgggtggccttcaatgatagaacgaagctgttctttcggctgtcctgactttttgcactctttcttctggacacagtggatcatgatcattgcgacagcaaacaggtcataggagggttctgcttttcttgttccatacccccaatagcccctgtcgtaaaactccgtatactctttaatcgcgcggccctgttttgtcgttccccctacatcaatgcagcgaatggcagccggtggtccggttacaatgagattgtccggtttgaggtcgccaaaaacccatccttgctgatgaaggactgacaggctggaaagaagctgcaccatcagcaccggaatccactccgctcccttactgctgatatattgcggaagaagcggcccttctatgtactccatcacgtaaaaagggacatttttattcagctgcggaataaacgcgtcgtccgcatcaaaaaaagaaggccccatcgtttgcgaccgggcctttgaaaaggattttaagacattcacttcagaggtaacagacatgctgtcgctgcttatcttcaaagcgacctgtccgcctgatgcttctgccagatatacaataccgttagccccttttccaagctgtttgagcaatctgtaggatttgccgttccatttgccctgaattgccgtccccggtgccagactacatgccaaactcgttaaagcgtcgttcatcatctgccaacatgctccttcttgagcggattctctcaaactgctgcgtcgcttcccggatagcggggcccgtaggggtgataccgccggtcgacagcttcgcaaagagtgcagaaagggattcaagcttcggcgtccaattcagcacaagctcaacttcctggcttttcccgggaaatatacacattgcaaattcattttgcccggcccgggaatttaaactgatggaaagatcgatcagcgcttctttcaccgtcggcagtttcggcgccatactcgcactcgtatcaaccagcacaagcacttgcagatgaaccgtttcgccgagttcatcaaccacttccatcacttctccgcgtttttcaggagaaagctcttccatttcaacgtttttccctaagatttgtttaagctcttgattgacgacaccttgcagcgtctgggtcattgcttttttcgtcaccatttgaaccgtctgagacaattgtgacgcatacacaacttgatggacgccgcctccggccatggcgatgccttcaacttccttcattgcttcttggtcaatcgcgttttcttccataattcctataacattcaccgtaatcccctgctccttggcgaaagccgccattgcgatcgggtcttcaccatgattggagcagccatctgtaatcagcagaacttgatttaaatgtcccttattcacatacattcctcccggtgatacgattagtcccatcttcgccagaaggaaagtgatttatacgaatggattaagaaatctcctttttattttggaaaaccgccggcaccggtatggaagcccatttcggcgtgttgtgatcaatccggacaacaaccactgtcatatcgtcttcgatttggccggatcgtgttctgatgacctcttccattaatatatcagcgatttcctgcggatcttcggttttcagccctttcattttccgcttcatccacaggtcgtggttttcaacgtgcttcggcccttcaaaaataccgtcactcatcatgacgagcagatctcccgcttttaactgttcacttacaacctccacatcaaattcattgatgatgccgatcggcagattgctggcctgcactttcatgacttgatctccccgcttgataaaactcggcgttgaaccgaccttcaagaatttgcagcttgcatcctgaagatcaatgatagaaagatcgagagttgagtagatttcgtctgtcgtccgtaaagacagaatactgttgatcgttttgatcgctattttttcatcaatacctgattcgagaattttttcgagcagcttaatcgtttcattgctctcataatgggccctcgccccattgcccatgccgtcactgatcgcggccgcatattttctcgcccccagttccatcatgctgtagctgtcgccggagacaaggccgccgccttttgccgcatgagccgcgcctgtcgatacccggtatgacttcgtcgaaccgaacgcaacatggctgtagccattcggatgagtcgagtgctgttcgcttttgacaagtatctgctcctcaagaatgtcagacagcatcggggcgataattttctcactctcgccgtgtcctccgctgaacgggattgtcatttcgatatcaatattgccctgctccaagctgtatatctcgacatgctgaatctcgattccgaaatgctgaagcgcctctatcatttgttcttcctgaataaaatgctgctccctctcccgttttatttcccgagaaaagtccgccatgacctcagaaacccccaacagctgctcggcaacaagccttctgctgtcctgaacttttctcttcagtgtcagatgggcgtgatggtgggcaagttcgtcctcaatcagctcttccacctgtctggatttggaacagtgctgttgaaactccttttttaatctgcggtttgaggcatactgtttttcttctgtttcatgcataacttgtttcattaagtcatatgttttatcaaagttttgaacccagcatttacttttcttatagcaggattggcaggaatgctcggtgattttgcttaaaaagagatccacttccccttcttccgcctgctcatcggaagacgtctgatgaaaggtggcgaagctctccgacaaggcatgaaacacattggagaactggtctactttctgggcggtgacatctctgattttcctcgcgtactgctgctgttcctgactatgctcagcagtgcccggtatgtatcgcgccacctttttcgtaatcgattggggcgtaatcaaaaacaaaacaacggcaatcaaagattcataaagagtggtcattaatccggcagacccttctccatataatgaaatcagcagtgagccgatcactaacccgactgcggctccagctttctttccttctttcagcagcccgccaagaagcccggaaaacgcaagcagactcatttgatagagattcccgatattcgcaagcccgaggatcagtccggtcaccacaccgaccgtacagccgatgcttgccccgccgacaaaggaaaaactcagcacgacatagcgggccaggatatgttcagcctgcattccctgaaatgaaacaccggcaagcccggttaaaacggatgcgatcaagatcataaaacagatgatttcttctatttttaacgattgcttcacttttttgatcgtgaagatcggcaggctttgcaaaaagatcagcgtcaaaataaaggccaggcccgcctcgacaacagccatcacataatcataggtggtaaaagcgccgctctcaaaataaacaaatccgattctcgccgcagccatagagaaaaacaccacgatcggcagcatcttcacccggtcctgcacgatatatgtaccgatttttgaaaatagagtgaagacggccaaagctgtgagaatcaataaagagtgtttcggcgaaatggttaaagcgcccgcaagtaaagacagacaagcatagaaggctttatctcttctgatcaaaagcatcgctccgaaaaacggcagcgcaaacggaagaacctcagataatatgaaagcccgtccaagtaaaaaaccgatcacaacataaatgaaacccttatagaaaaaaagtgaatgcgcttgatggactgtaagctttgccgccttttcaaaaaacgattgcagtttttccaaagcttgtcccgccatcggcccgttcactcttctttccgctttttccattgctctcatcccccacctgttttattcgttgcttgtcattataaatgaaagcccagataggattttgtcaaaagaaggtaacaattccaaagaactcttcgacgctttctcccttgttcccctttcctttcgtatttcctacgacatttctcaaaaagttgtctaaatatgaaaaaatcggcttctgcaacagaagccgattcgcttgatgacccgtacgggattcgaacccgtgttaccgccgtgaaagggcggtgtcttaaccgcttgaccaacgggccagatatatatggtagcggcggaggggatcgaacccccgacctcacgggtatgaaccgtacgctctagccagctgagctacaccgccatataaggtgcttataagcacaagttatataatacaaaggtttcttcattccgtcaacagaaactttgaagttttaattttctgactataatgacacatacaaaaaaagcacccgctgggatagacggatgctccatgtatttatagaaagcagcaagttatcctcttcttgctccgcgccctccacgttttgattccgtgtttcgttttaaagatgataagcggtcttcgctatctttaagaaacttgttcattttctgttcaaaagattctttcggacggaaatcatttctaggtctggcttgcggacggtctttagcttttttaattgataaaccaattttcccgtctttttcaacgttgatgactttcacttcaacttgatcgccgacttttaaatgctcgttaatgtctttaacataattatcggctacctcactgatatgaacgagaccggttgagcctccaggcaattcaacaaatgctccgaaatttgtaatacctgttattttcccttgcaacttgctgccaacttcaatcgacataaaaaaagtgctcctccttaggcttataaaaagatcgtttgtttaattatacctaaataaaaatttaagtgtcaacaaggctacttgctcttcttttctacattgaagagtatctcaccatttcctgacataaacaagtctcttctggcaagctctgtgacgtaatcctcatcctttaatttggaaatttcatcttttaaatcagcctgtttcgcgttcaattctttcacttgtttttccagctgagctttcttttcttcgtttgcgctaagggaagaggtctgtgaccacagagaacccgctaagacaatagccgtcaacaacacaagggcgccgaatacgatcaaccgtctgaaaagccctttccgccttcttttcataagctgggattgccgttcaacctgctctttatagtcgttttggatttcagttattgtacgttctctagatagattcaaaccagacggtcctcctttcaccttttcaaaatacgtatcatggtcgatctgattgttatgattagtttcttgctcttttgtaaaaatcctgcacttttttgaaaatatcgtttgaaagtaagacgccacttttcaggaagaagtttcaataattgtttcaacaggaaaaacagcggatacagcaaaaacgttacgatcttaaaaagacacttcgcaaaaaaggcactcacccgataggagtataaagaaacaaccgtgatcagcccgatgagcagcttaaagagcagaagcaccggacgaaacagcacgtgctgaatgagcttttttgcgaattggtaaagagacaccgcaagatgaatggcgaatttcaatatttttatatacattcgtttaaacaggctttggtacgtcgcaatccccagtaagacagccaagaaaatgtataccctgagttctccttcattcacgttgagcagcacatagaaaaacagcagaccttgtacaatccaaaagagaatgtcatgaatgaataacagccatctggccgttttggcgcggctgacaaacagcctgtatgtatcaagcgacgctccgagccaggcgcccataccggtcattgccagcatcgtataaaattgggtggtcagcgtcatttaaacaacttgctaaaaaaccctttagctttatccccttgctgctcgtctaaatatacaaggtcgaacaccctgccttttatagatacaatccctttttccacatcaagatttttcatctgcaggttctcgcctctgacggaaagcattcccataaccgtttccagcaaaaactcttcgttgtcaaaactttctacatgcttgacgcccgaaatgtctaaatgctttctccctttcatcgttacatcatgctgttccggaacagaagaagaacctttttgctcataatatgaattcatctattcagcccccatatcctcgatacttttagcattattactgcattgtatgaggcgggagccttgtttagaacaagcctattcgccgagtttttcttccttgacgattgtatacatgcccgcggcttcttcttttttcgttgtttctttcaattcgtttaccttcacggtgacaagcttctggccgaagcggaccgtcagttcatcaccggcttttacgtctgagctggctttcgcctgattcccgttaacggtgattctcccctggtcggcgacctctttcgccaatgtgcggcgtttaattaatctggatacttttaaaaacttatcaagtctcatatcagaatctcctctccatttcttttgcttcatcccacaatttgtccatttcctcaagtgacattgcggtcaattcaagtccctttgctgccgcttctttctcaatataagcaaagcgtctgcggaatttgtcatttgtcatggcgagcgcttcctcaggctcaattttatagtatcggccgatattgaccaatgcaaataaaacatcgccgaattcagcttttaagctgatttcatctgctgattcggcggaagcctctgcagaaaattccttcagctcttcatttactttatcccatatatcctgaacgtcatcccagtcaaagccggtttttgcggcttttttctgaagcttggccgcttttgcaagagaaggcagtgttttcggcacggcatccagcaatgaagtggatgttgtttgcttttccgcctttttgatttcttcccagttggcgacgacatcatgtgcatcctgaaccttaacatccttaaacacgtgcgggtgccgtctgaccatcttcgcactgatgtctctgatgacatcatcaattgagaaatacccctcgtcttctccgatctgggcgtgcagcataacctgaagcatgacgtccccgagttcttctatcatgtgatccgtgtcctcttcgtcaatggcctcaagcagttcgtagcattcctcaatcatatatttctttaatgactggtgtgtctgcttttgatcccacggacagccgttcggcccgcgaagctcgcgaataatacttcggaatgcagaaaattcctggtaaaggagttcttcttttttaatcggcggaacatacacgcttgttaagttatttatttctacattgcggtcaagttcaaacaaaggcaccttggtcattttttctcccttgcttccggctgccgtgacgatgaccacttcatagtcgtcaggcaatttctccataagcgtcagcttcacctcagaggccgtcatttggtcataaacctggcaaatgatcaggtgatgccggagttcgagctcatccggcgtcattgtttgcgcatccgtaaattgaaacccttcaatcggatcaattcgcaatgcattaaaagtggcatccaaaaagctttgccctccggcagtatgaacagctgcctgttgttcttcccggcgttcaaataacagctgaacggttttctcagcgacaaacggatgcccgggcacagcgtagacgacatcctcttgcttcgctttttcaaacagaatgtccgcgatctcttcatagaccgcttcaaactgatcatgtttttcataaatatcatcaaaataccggatgtccgcttccgtctcttgctctaattccggaatcaaagggtggtctttcgttcttatatataaatgcttcgcctgagtcagcagcttatgtacgcccactgtcaactgatccatgtctccggcgccgagaccgacgaccgtaatgttacctgccatgtttttctctcctctttttcaatttgcttaaagcactgccgaaaggaaggccgctcagctcttcgtccgtgaaaatcttcattcttatcatacaataaataaacaatagccctccgatgaccgacgcagacagactctcacatacagctccggccctgctgacaggaacaaataactgccatagcttcatatatacgagcagaaagaagaccatcagcagactgcaccagcacagacgggcaatcacgccgctgatattcgtcagccagcccttcgaccaaattctccggagattcaggcacgcaactgcggcaaatgccaagacggtcgccagtgccgctcctgtaataccccagccggggaccagccaaacattcagcacccatttcagcgcccctcccgccaaaacggatacggcggggaaaacggtatgtcccgctccttgcagaatcgcggctgccgtaagcgcaatcgaggcaaaaaagatagataagctgaatatttgtaaggtctgcgtcccctcactgttttggaaaagcatgatattcaccggctctaaaatgcaaaaaagcccggctgatgcaccgatccctaccgcaaggcagagcttgacggctgatgtcgctttctcttttatgataaacggcttattctcatgcaccgcttttgaaattgaaggaaccaatgacgcggcgatactgacggcaaacacggttcccagctgaaggagcggctgtccgcggtcatatatgcctttcagctgtttcgcggcatggctctccgtcccgtctgaaagcagtgaatataagtttaaggcgtctacaagctgaatcaaaagcatgagtacactgctgatacagatggtgactgaataaagcagcagcttttttacaatgacggccgtttcgatatgtccgccgtctttcttggtttcttcccgcttataccagaaaacagccaatacacaaagggccgccaagcttccggcaattgatcccgaggccgcccccgcaccagccgcgtataatgaacggccgcttttcaaaagccagaaggataaaccgagaagcaccgccacgcgaagaagctgttccgtaatctgggataaggctgacggcatcatatcatgcacgccttggaaatacccccggaaaaccgccgtaaacggaaacagtatgaaagcgaacgccgcgacccttatcagcatcacaaggcggtcgtcacccataaaaccggccaacggcgccgcgccggcatacatgagcgcaaacagaacaagtccggccgccgtgacataaagggcggaaattttcattattttttgtttatgatcgctataatcgttcattaattttgagatgattaccggaaaaccggatgttgacagcatgaccgcgatccctaaaaacggatacacctgctgataaatgtaaaatccgacgtcaccgacaatattctgaaaaggaaccctgtacacggcgcttaatatcttcgttacgatacccgcaacgacgagcacaaaagcacctttccatgccgattgccgcttggcgccaactgaatcgttcatccacaagctccttccagccgctagaaaattacgtctataaaacgagcttattatatcacaatcctaacggccgaaccgatagagagcacatatgaatatgaaaaagaacagcacttgtataagagctgctctttctccgttttcttatttcaataatggtaataagacctactgctccatttgtctcgccaaaaaactggctgccgtttctaccgctttatgttctacttctccaagtgcctgttccttggaaaagatgaccacggcaccgataggatcgccatttgccacgatcggagctattgtataggagctcatatcttcatcaatgtcattaacaagctgcgcggacttcacgtcgttttctaccactgagctgcgctgatccatcgttttttcgagcaaatcgctgatggctttgttcagaaattctttttttgaactgcctgaaacggcaatatacgcgtcacggtcgcaaatcaagacggaatggccgagactgtcatacaaagcatctgcatattccttcgcaaaatcgccaagctcactgataggagaatactttttcaatataacttctccgtcgcggtcaacgaatatttcaagcgggtctccttccctgattcgcagtgttctccgaatttctttaggaatgacgacccgtcctagatcatcaatacgacgtacgatacctgtagctttcatctctctggtgcctctctttcatgtgatgatatttaagggaaagtactaaagctctttactttatgtagcttccgccactcgcttgaaattagtatccgtcacatcaaatgtaatatacaccagagagtaacaatttttatgaagacgcgattgtttctttcttcacatcctgaaggcctttcagcatgccgagcacggtttccagccactcttccgttttgcggcctttcgtctgtactgagattttcagctttttcccttccattcccagtccgatctgccggccgtatttattgccgagttcgaacaatttctggccgtcaatctgtgcgctggcctcttcagaaatggtaaatctgatcgcgtctttatcctgcttgatgagttcgacgcgttcatattttccgtataccttcatctcagcaaccgtaaacagccattcaacctctttagggtagctgccgaacctgtcgatgatttcatcttgaagctcatttttctcctcaattgtggcgattgacctgaaccgtttgtacatgtcgattttttgcttgccgtcttgtatatagttttcaggaatatacgcgtcaagctcgatatcgatttctgtctcaaactgttcgcttttcggaatatcgcctttccgctcttcaatcgcttccttgagcatttgcgagtacaggtcaaaaccgactgagtcgataaagccgtgctgctgcgcgccgagaaggttccccgctcccctgatcgtcaagtcacgcatggcgattttaaagcctgatcccagctcggtaaattctttaatcgcctgcagccgtttttccgccacctcagtgagcactttgtctctgcggtacgtaaaatacgcataagcaacgcggttggaacggccgacccgtcctctcagctgatacagctgagacagccccattttgtctccgtcgaacacaatcaaggtattgacatttggtatatctacgcctgtctcaataatggtcgtgctgacaaggacgtctgattccccttccagaaaattgagcatgacgctttccaattcattttcggtcatttttccgtgggcatatgccactttcgcatcgggaacaagcatggaaatttcatcagccttccgctcgatgtcatccacgcggttgtacaagaaatatacctgtcctccgcgcgccagttctctttcgatggcttcccgcacaagcgcgccgttgtattccacgacatatgtctgaacagggaaacggttttccggcggcgtttcaataacagataagtcccgcacaccgagcatggacatatgaagcgtacgcggtatcggcgtcgctgtaagagtcagcacatcgacattggctttgatctgtttgattttttccttatgcgttacgccgaagcgctgctcttcatcaatgatgagcaagccgagatctttatagacgacgtctttagataagagcctgtgggttccgattacgatgtctaccgttccgtttttcaggcctttaatcgtttcattggattcttttctcgttctgaatcggctgagaagaccgatgttaatcggatagtcctggaaacgctccataatggtttcataatgctgctgcgcgagtattgtcgtcggcacaagaagcgcgacctgctttccgtctgcgatcgctttaaaggccgcccggatggctacctccgtcttcccgtaaccgacatcaccgcaaagcaaacggtccatcgggcgctctctttccatgtcctttttaatctcctgaatggaacggagctggtcctctgtttcctgataagggaaagcagattcgaactgccgctgcatttcatgatccggcgagaacgcatagcctttgcttgcttcccgttccgcataaagcttaatcagatcatcggcaatatcctgaacggagttttcaacttttttcttcacccgtttccattcactgccgcccagtttataaagcttcggttcttttccttcagagccgacgtacttctgcacctggtcgatttgttctacagggacgtacagcttatcgctgccctgataatgaatgttgaggtaatctttatgaatgcctttgatttctagtgtttcgatccccaaatacttaccgatcccgtggttgacgtgaacgacatagtcaccgacctgaagctcggaatagcttttgatccgttcggcatttgtcagcttctgctttctcggctttttcttgattcggtttttgaacagctcttcctccgtaatgacggccagcttcatcagcggcagttcaaaaccggattgcagctcgccttccatgacatagacctgtccttgcacaagcgctttggagctgtccgtttttgcggcttcaatttcgtaatcagccagcacggatgccaatctgtcggttctgtccttatttgcgcctaaaaagacgacagtgaagtttgatttcttaaagcgctccatttcacctgcgagcacattcatctgcccgtgaaaactctgcatctgccggcttgtcacattcacgatattctgagggcttgtatgctggacatgacgcaaaaataatgaataataaatagccgggcgccgcttttcgctcataagctcctgaaagctgaaggataaatgaatgtcatgcagaattttcccttcctcgagcagacttgtcataaattcggcctcttctttttgcagctgatcctccatttcatgaatgcggctgacctcgtctaacagtaacaacgtgtctgccggtgtataatctagcaaactagcaggtttttcgtaaaagtacgagagatacttcacaagttcctgatcagtctgtcccgttgataaccgttctttatcatgtgagatattgatatgaagcatttccttttgtttgtcctgcttcagctttttcagactgtcggccagccctttatcgagcctttccattgcccgggctttttcttccgccctgatgatcaattccttcgccggtccgatcgccacatgtttgagcgtctcaattgatctctggtcatcagaattgaagcttctgatggaatcgacctccgtatcaaacagttcaattcgcaccggatgctccgacgtcagcggataaatgtcgataattccgccgcgaatactgaattcaccgggtgcagaaaccatatcggaacgctcataccccacctctacaaggcgcgcggacagctgatccggttctatatcgtctccgagtgaaatgacgagctggctgcttttccacagctccttcggcggaagcattcttctcactgccgcaacgggcgccacaacgaccggcgcttctccgtttgttaatctattaatgacatcaagccgctgagcgcgcagttcaggactcgctaccgcaatttctgaagaaatcaattcattcacggggtataaaaaaacagattgatccccgagaagcgccgtcagatcttccgtcactttttgggcctgatataaattatgggtgataaagaaaatcggccttttcgtttcctgtgcaagggcggaggtaaaaacagaacgcgcggaacctgacagacccgcaagcagctgttccttcagcccctcatgtaaaccgttgacaatggatttaaaatcatcgctttctttaataaaggtttgaatgttgtccatatgggccctcctctctattttctgcaagaacagaaaaacgctttggtctagaatctacaccaaagcttcttattgaataaatgtgttgtgttcatggtagtgcggattgcgctccagcgcctcttggcagtcttcacaaattgtaagaacatggacatctccattgtctttatatgaaatcatatcgtttctttcctcatttgttaagtgctgaaatccaagtgactgtgtcggcaccgtcgaatattccaggctccctaccttaaagccgcagtggcggcagaaataatgcaaagccatacgttggacctcctgatgtgaaaaaatcatttttccctagtatggtctcccattatttatcttatacatttgcattaaattcgttcatgacttctaaaaaaggtttcgttaaggaagcttcgcaggcttttacggtttttgagacggcatcattgatatgcggcgcttcttccttcgtaaaagctcccagtacatagtcaacgactttcattccgttgacggggcggccgattccgattctgacccggtcaaattcaggggttccgaggtgctgtataagcgatttaattccgttatgtccgcctgcgctccctttcgtccggagcctgatttttcccgtcggaagatcaaggtcatcgtatatgactttcagatcttcatgatcggcatcataataatccagtagcggccgcaaacattcccctgataaattcatatatgtaagcggtttaacaagtagaactttttttccggaaacaaaccccattccgtaaagtccgttgaatttcgttttattcagttcaatattccattctttagaaagctcgtcaatggccataaagccgacattatgtctcgtgttctcataggttttcccggggttaccgagaccggcaatcacaagcatcgtaaatcctccctcaacatcgctgtaattcttctcattctagcacaaaagacgtaacctcgggcgggttacgtcttaaagcgcttattgattttctccttcgggctcttccccaggagacggttctgcatcttcttcgaatgcttcctgcttaggaggaaggatggaagccacgacttcttccggatcgtttgtaaatgtataattgccgtcagcagtcagatctgcgatggtcagcacatcattcatctcaagccctgaaatatcaacattgattgtctgagggatgtccttcggtctggccttaatcgaaagctcatgcagcggctgctggatgacgcctccgtctttgactcccttcgcctctcccgtcagctgaatcggcacctcggcctccagctcctcactcatattcacgacttgaaaatcggcgtgcgtcaattcgtttttgagcgggtctgtctgaagatcagtcaccataaccgattgctgatttccgttgacatcaattgtgataatcgtgttttttccttcgtcccgcaatgttttaagcaattcgacactgtctaaagagacaggcgtattcgttgtttctttaccgtatataatccctggaacatgtcctgaatgacggattttccgaagcgtcgaacgtttaaaatctgttctttcatttgcttttaaagttgccatattcagcaccatcctaattatcgttttatcgtcctattagaacaatacccacaataactgggatttaaaccttaaagtttcggtttagctgaataaatagctgacagattgtttctcgtgaacgcggataatcgcttcagccagaagcggtccgacagaaagctgcttaaagcgttcgatttttttctcatcaggaagcttaatgctgttcgttacgacaagctccttgattttagagttattgatccgctcaacggcagggcctgacagtacagggtgcgtacagcatgcatacacttctgcagctccgttttcaaccagcgcgttagcggcaagtgtgattgtgccggccgtatcaataatatcatcgatcagaatcgctgttttaccttccacgttaccgacgatgttcatcacttctacctcattcggtctaggacggcgtttgtcgataatcgcgatcggcgctttcagacggtccgcaagtttgcgggcgcgcgtcacaccgccgtggtcaggagaaacaataacgatatctttcaagtctttaccttcaaagtaatggcctaaaatcggaacacccattaagtggtcaatcggaatatcaaagaaaccttgaatttgcggcgcgtgtaaatcaagcgcgatcacgcgtgtcgcacccgctgtttcaagcaggtttgcaaaaagttttgccgtaatcggttcacgtgatcttgcttttctgtcctggcgcgcataaccgtagtacggaatgacaatgttgattgttttcgcggaagcgcgctttaaagcgtcaaccataatcagcaattccatgatgtgctcgttgaccggcgcacttgtagactgaatgatatagcaatcacagccgcgaatactttcttctatgttgatctggacctctccgtcactgaatcttgtaacagagcactttcctaattgaacccctacattatccgcgatttcttttgcaagttctggatttgaattcaaagaaaaaatctttaaattcttatctccgtattcgttagacatggtaaacctccgattttaggattattttttatgaatgtttttcacataatcttctttatttacttgtcttgctctggcaatggcaagcgcttcgcccggcacatcttcagttacggttgaacccgcagcgacgtacgcgccttctcccactgtaacaggagcgaccagattggagttgcagccaataaaggcgccgtcttcaattttggttaaatactttttcttcccatcataattgaccgtgatggagccgcagcccagattcacatccgtgcccacttcggcatcaccgatatagcttaaatgagatgctttgcttcggtcgccgaattgtgttttcttgatttcaacaaagtttccgatcttcacttcattgccgattgcggaatcgggtctgatgtgagcaaaaggaccgatatttacatcattcccaactttgctgcgattgacaacggattgtttaatcacagtgcggctgccgattgagctgtcctctatctcagtgtgagggccgatgacacattcatcgccgatttcagcttgtccctttaacacagttccgggataaataactgtatcttgtccgatacgtgcgtcaggtgagatgtacgtattcatcggatcgattaaagtgactccgttctgcatatgccgtttgttaatacgctctttcatatacatttcagcctgagaaagagcgactctatcattcactccgagcgtctcttggaagttaccagtctggtaagcggcaacagtttcgccttcgtctttgaggatttcgatcacatccggcagataatactcaccttgggcattttcattcgaaacctgttcgatgacacgaaaaagagcctcgttatcaaaacagtacgttcccgtgttaatttctttcacaagacgttcttgctccgaagcatccttgtgctccacgattttttgaacggcgccgtcttcactgcggatgattcttccgtatccggcgggatcgtcggcaacggccgttaacaccgtggcttttgcacctttgtctgtatgttcattcagcatggcttccatcgtctccgccgtcagaagcggtgtatcgccgcaaataacgatcgtgacacccttttctccgtgaagaaatggttttgcctgtttgaccgcatgagccgtaccgagctgttctgcttggagagcgtaatcgcttttctgtccgagctgcttcttcacatcttcggcgccgtgtcctacgatggtgacaagcttcgctaaagataatttcagagcttcgtctgcgacgtgctctaccataggctttccgcataccggatgaaggaccttgtaaagcttcgatttcattctcgttccttttccggcagctaaaatcactgcaaaccgcttatccatttaatggcctccaatatcccttttatccatagaaaaatatatcctaaatagctgttgatttcaagaagacatcaaaaagtgcaagaattttctatgtaatcgctttattactgaaaaatcagatttaaaaaaggactgccggaaaaggccttgtgtcagcctttatcagcagtccttacattttgttatgtttaagaagccccggcttcttcatattctaatgcttcagaatcacccaaacgatgatactcatttaaaacagcatcctggatcttgccccgcgtgctggaattaataggatgagcaatatcgcggaattctccatcaggggtgcgtttactcggcatcgcaacgaaaagaccattgtttccatcaatcacacgaatatcatgtacgacaaattcgtgatccagcgtgatggatgcaatcgctctcatgcgaccatcggtattcacgcggcgtaatcttacgtcagtaacttccacagtagttcaccaccttttccctatataaaagcattagtctaacaattccacgattctttttaaattcctgcacgtttcaaaaagtttttttgaaaatataggatatacatacacaattaggtgataaaccatatttggggatcatatactgcataaaaaaagtgatcccgaataccggaaccacttttctgagatttaagatttcaccagcgcaatgacttcaatttccacgagagcgtctttcggcagtctcgccacttccacacaagaccttgccggcttatgtacatcaaagtattgtccgtacacttcattcacttccgcaaactgctccatatcagcaataaacaccgttgctttgacaaccgtctcgagagaagcgcccgcttctttcagcacagcttttaaattgctgaacacctgatgcgtttgttctgtgatatcaccgtttaccatttctccttcagcagtaagaggaatctggcctgagctgtaaaacatgttgtttacgatgattccttgtgaatatggcccgatcgctgccggcgcgtgttttgtatggattgcttttgtcatttttctgtctccccattctttacatgctgttctttaaaaaatcgcagaaaattgccgttttgaatctcaatcgttttgtctttcatattgatggttgaaagcgtgagcagtgacatgtattcatcgacaagccgttcattcactccctcggcttcaaccaagacgcctattcccgcaacgtttgcattaaactcatcaagcaggctgatcatgccgttaatggtgccgccggctttcataaaatcgtcaataatcaaaacgttcgatcccgtagccaaacttcttttcgcaagcgacatcgtttgaatgcggttagacgaccctgatacataattgatgctcaccgtggagccttccgtcactttattgtcttttcgcacgatgacaaccggaacgttcagataactggccgctgcgtaagcaagagggattccttttgtcgcaacggtcatcaccacatcaatctcccgctccgcaaaaacggaagcaaaaagcctgcctacatgagagaggacagatggttttcctaagatatccgttaaatatacataaccgcccggaaggatacgctcaggatttactaaagactgtcccagctcctgtataaacgcttctgcttcagcctgtttcacttttggaatgtatttgacgcctccggcagctcccggcactgtaagcagcgtcccaatgccttgctgttcaaaggtctgtttaataatcgttaaatcttcactgattgatgactttgctgattgataccgttctgagaaaaacgttaacggtattaattcatgcggatgggttaacaaataatttgttaagtccaccaatctgccgctgcgacgaaacttcatgaacttacccccaaaatccgaataatttaaaaataatataacttaacatacggatttaatcaagagcattctgttcgccgatcatccgcactgcgtacacttgatcacagaaacctcttaacccgttataaatccgctgcaccttcgattcgtattgaaccaaaccgaatacagtcggtccgcttccgctcattaacaccgcatcagcgccgaagcgtttcatttgatttttaatcatcgccacctcgggatggaggctgagcgtaaccgactccaatacgtttcctaattgtccgcataccttttggaagcttttttcttcaatcgcgtcaatcatcgtctgcacatcaggatgccgaacctgctgtaagttcagccggcggtacacttcggcagtcgataccccgatcgtcggtttggcgagcacgacccagcaatgaggcggagcactgatgtgcctgatcttctcaccgcgtccggttgccagagcagtgcccccgtatacacagaaggacacgtctgagccgatttcagccccaagctccgcgagctcttcgacagaaagctttaaatcccaaagcctgttcagccctctgagcgtggctgccgcatcgctgcttccgccggcaagccctgccgctacagggatcacttttgtaatcataatggaaacgccttttttgacttgaaaccgttctttaagcagtttggctgcctgataagccagattcctttgatcatccggaacaaagcgattatgcgacgccactctgataacgttttcgggcagttctgtcagttcaatccgatctgccaaatcaattgtcgtcatgatcatctccacttcgtgataaccatccgggcgtttactcgtcacatcgagggacagattgattttggccggcgctttttctaaaatacgcatagctttcacctacttctccatctaaacataagtatgaacattgtatcacatttggagacccggaggtacttatccgaaattgacgccggttttgaatgccgatagaaaaaaccggggaacggattgtcccccgggccactgcattatcggttattttggttctgagccgccatctgctgttcggcaatctcaatcgcgcgctttaccatattcccggcgtcacgcgcccgaatgcctccccagccctcgtttttcaccgtatcgtaaaaaccaaggtccttcgccagctcatatttgaactcatctgacataactccacgacgtctgcccaaacgaaacaaccccttttatagaattgatcaccattcgtgcacgccacgataaaacatgtgacacttatagcttccgtttaatcggccgaaactttcgagggaataattagaagagctttagaaggcaaaacaaaaagcagtaaacaaaaggttcactgcccattaaaatgctactgagcttgccgcatcgtcattgaatgtcaattcaacagtctcagtcagaatatcagcataactgtatgaaactctttcaaacgaattctcgtcttgatctagttgtatcacaaaaacagaagggtacgtctcagctaaaatgcccgaacgctcaatcgtttttcggcggccgccgtttgcttttaacgtaagccgtttacctaaattcccatcaagcgatctttttatatcggacaacgtcttcgccattgcatccacctcactacatttattgtacaacaagagcccaattttgtcaaataaaatttaaattatatcaacgttaataagtcattgtcaacaaaattattttgacaaaattctattgatttctgcgttatttttcacaagttccggaaatttatgtatcaatatgtaaaataattaacccgcatagcgaaatatatgcgggttttatcactcatccatttgatttatacggcataccgacacgcagcacacccttcgtttcaattcctcccagccctttctctctcgtcagcgtatttctcaggacatcccatacattgatccgctccataaacggagtgaagctgattttcgcgacaatatataccgggtcaagcgcgtggatattgacgcgtgacggcgaacttgcaaaattcgcgcccgctctgattaaagactcgaaatgagattggcaggcccccgcgaatataaccagctgatccaaatgagggactttacgcctcgctctttgaacggtttcgacaaagtgtttggaatgcctgtaggcgcttaaatcgttcacgcctcccttatgcttggaatatgcatcatggccggtgatgactaaaatatccggcctgtatttatcaagcagctcgtcaattgatgccggcatttttttctcatggcaatgaattccgtataccggcacaccgattttttcataaaagttcaggcactttttcaaataggcctcatcgccgtccagatgcaatacctttccgggcatatgaaagtagtgctcctgatgctgatattgatttgtcgcataatattcctgtttttcccgaagcagcttataatcctggcggagcagctcgagagattcattcatcctgctttcatctcttttctttctcatggcctgttcgtcttttctgacaggctccaaatcagaaaaatcagcatccgcaatcaatctgacttcgtcaccatgcaggatggcaattgaatttccgttgcttgtttgttctataccgataatgcgaaataaaacatccatttgataggatttcctggctaccatatctcctatttgaaattgcacgttacccactccacaaatagactaagcctcatcatgaaagaagtcttggcaaatacacctctttccgctgcggcgcttgatgtttcaagcttttcttgcagttgaatgaataaggttctcctctagcctatgtagcggcagtccaagtggtgacgcaaaacaaaaagccctcttagaaaagggctttatgcaatccgttggacaggagcgcgaattcttctatggacagggattcaccgcgccgctttccgtcaatattcgtttcttgaagaacttcttcaatttgagcttttttctcttttccgcccggaagattgttcacaaggttgttaagcaaggttttccggcgctgtgcgaagcttgctttaatcagctggaagaaaaacggttcattatcgacgtcaaccgccgggccgtcacgaagcaagagacggatgacggcagaatcgacattaggctgaggcacaaacaccgttttcgggacggtcatgacggttttggcctccgtatagaactgaaccgcaatggaaagcgatccgtactccttagaggaaggatcagcggccatccgctcagcgacctctttttgcagcatcacgacaattccttttaacggaagatgttcttccaagagcttcatgatgatcggcgtcgtcacataatatgggagattcgccgtcaccataatttcatcacaatcctgaaaatgctcttcaatgacggatttgacgtctgctttcagcacatcttgatgaatgatcgttacattgtcatacggagacagcgtatcattgagaatgggcagcaggcgctgatcaatttcaaacgcgacgacctttttcgcccgtttggcaagctgctctgtcagcgcgccgattccgggcccgatttcaatgactccggtccgatccgtaatttccgcatggtccacaattctgtccaatatatttgtatcaattaagaaattctgtcccagactctttttaaaagaaaaaccgtactttttcagaatttccttcgttctgataggtgtcgcgatatctttattgttcatcctgttcctcctgcctcatagcatcgagcgcatcaataaaatcacttcttttgatttgaaacatttgcagccgtttttgaagctgcttgccgtttgtatagccgatcttcagcaggtcgcccaatcgttcgcggcgtcttttggcagccggtccgccgatcagaccggcctgtatgacatcttcagctgaaatctcactcggctttgcctccatctcttcatgtacattttccagacatgctctgatgctttcaatggatgcgtgctcaacgccaatgccgcgcttgtttttcggtttggcaagatgtttgggcagaaatgcgtgtttacagccgggtactgcttcagaaatggttttccggatcttttcccccggaaaatccgggtccgtcagtacgatgacccctctcgtttcctgcgccagccgaatctgtctgatgacttcgtctccgattgcggaaccgtttgtctcgatcgtatccgcatcaacggcaagttttatgcgcgcagtgtcatcgcgtccctcgactacaataatttctttaattttcattacttcctccaaaaaaactttttatatccaaaacgaaacctttgcttgcatgtcacgtctaatatactgaaaatacactttacctattataacgaaaaaaacagagggcgcaaaaccctctgagtgaatcggaattaatttaagatttttattttgacctgtttctttccccagcggtaagccgaagatttttcagggaaaaagacatcaatccgtcttcctttaatggctgagcctgtatcagcggccacggcatccccgtatccgtctacgtggactcttgtgccgagcggaatgacgcttgggtctaccgcaatgactttggcattcggattgcttgtcaggttaacgcctgtagccgtatggccggaacagccgctgcagcttgcggtataagccgtagaagacacggtaatcactttaccggaagatccggtttcgccagaagatgccttcacaggtgcactgagctgctcaatcttgggactgtgccgctttgtgccgaccgcaatgatttgatctttgcttttttcagatgtttcttctttaacaagctttcttgaaacttcttttccattttctttgacaacatgaaaatgctttttaagtttgccttcttttcctttttgaacgatcttttctttcccgctgtcgagagacgcatcttctttttctttcacttgatacgctattttttcctcaactacatcggtgactttttcgatacgagtgatttgtatgccggcctgattttttgtgagcttttcgtgtaatgccggttttactttatcttcgtctttcatgtccatcttatgctgcgttaaaaagtcagcgaccgtagtcgaagtcgtccatattttctttttctttcccgcatcatttacagtgacctgaaaagccgggtcgaccgtgactttcatgccgtttgtcactttcgtatctgctgctggatctattttatcgtgctgattcacaggtgtatgctgttcgttcagaaatgcgccgactgtttttgccgttgaccataaagtcttttcttctccgcctcttgtcacacggatctgctttgcagcatcatacacgacattcatgttgtctgccaatgctgtctgcttagacggggtaatccggtcttcatttctcgtctctatatgtaaatcttccagaagttccccaaccgtttttgcatgagtgcgtatttgctttttcttgccgttgatggaaacagaaactgattgttttgagagctcatgtgccccgtatgcagtcccggttccgcccagcagaataatagctgcaataagaataaccttgcttttaccaagctttacggaaaacagttttttcattttttgtgtgatgaaaaacgcctccttctcctcggagagattatatagagtatctaaaatgctgtcaaccctcccatctcgaagatgaaaaaccttcagcgtatccctcattatgcaaaaacaaagcaaaaaaaggaagagagacatatcgacaacctatcttatgaggagaaggaagcttgtagaaccgttttacatatccactgaatcggacaagcctttacacgttacgacagcgcattctgtcagttcatgcggaaaagtctttttgcgttttcggttgtaattgaggcaatttcttcatatgtcagcccttttaatgcagcgagctgttcagcaacatattttacgtagcttggctcatttcgtttaccgcggaaaggatgcggtgtcaggaaaggacagtccgtttcaatcagcaaacggtcattcggaatttcctttgctacttcttttggtttcttcgcatttttgaaggtaaccggtccgccgaatgaaatataaaaattcatatccatacactgccgcgcaacctccgcgctccccgtaaagcagtgcataataccgccgacttcttccgccccctcttctttcaaaatcgtgacaacatcttccgttgcatcacgattatgaatgataattggaaggttcacttctttggcgagagcgatttgtttccggaatacttctttctgaatgtcttttggtgatttatcccagtggtaatcaaggcccatctctccgattgccacaactttttcgtgagaggacagttccttaatccatgataaatcttcctctgtcatgtcaattgcgtctaccggatgccagccgatcgcagcgtatataaagtcatattcctcaatcagctccatcgcacgcgtgatagtgggtttgtcgaatccgacaacgacgatccgttcaaccttttcagcctttgcacgcgcaatgacttcctctaagtctgtgtcaaattgctcggcatttaagtgcgcatgtgtatcaaaaagcatcataaaaactcctttcttgttgaaaaacaaaaggtgttcgacggaatgttacacgtgaaacaccttttgcatctatttatttaattcgagtgcctttcggtaatgactggtcgacagctacaactttgagaacgccgtccgattctcctgccagtatcattccttgagaaagctcgcctctcagttttaccggttttaaattcgttacacaaatgatcttcattcccacaagctgatccggtgtgtaatgcttcgcgatacctgatacaacttggcgctgttcaaagcccagatcaatttgcaatttcagcagccgatctgcttttttcaccggctctgcggacaagacttctgcgacgcgaagttctgtatccataaattgatcaaacgtaatttcaggaagacgctctgcttcttgcggctcttccgccttttcttctttagcaggagcagttccttgcattttttgcttgatataagctacttcttcttcagcttcaagacgagggaaaagcggttccccttttttcactttcgcgttcttcaattggccgaatgtctgaatgctgtcccaagctttaagagactgatcctcaactccgagctgggcaaacattttttcaggcgtctgcgtcaagaaaggctggagcaatacggccgaaatacgcaacgattcagctaaatgatacatgacagaacgtaattctttttctttttcctgatctttagcaagcacccacggagcagtttcatcaatatatttgttcgtacggctgattaattgccatagcgttgataaagcgactgaaaactccatgttttccattgccttttcataagctttaaccgtttcaccggctacagaagaaagctctgaatcaaaatcggtcacatttccttcatatgaaccaatctcgccgtcaaaatatttttggatcattgcgactgtacgattcagaaggtttcctaagtcgttcgccaagtcataattaatccgttctacgaaaccttccggcgtaaagacaccgtctgaaccgaacggtacttcgcgaagcaggtaataacgaagttcatccaagccgtagcgttcaattaacgttaccggatcaacgacatttccttttgatttcgacatttttccgtctttcatcaataaccagccatgcgcgaatacttgcttaggcagcgggagatcaagcgccatcagcataatcggccagtaaatggtatgaaaacggacaatttctttaccgacaaggtgaacgtcagccggccagtactttttgtaaagctcatcattttccgtatcgtaaccgagcgctgtaatatagttgaacagtgcgtcaatccatacatatacgacatgcttcggatttcccggcacttttacgccccagtcgaacgtcgttctggaaacggccaaatcttcaagccccggtttaatgaagttgttaatcatttcatttttgcgtgattcaggctgaatgaaagaaggattgtcctcataaaacttcagcaggcggtctgcatatttgctcatgcggaagaagtatgactcctctttgattaattcgaccgggtggccgctgtccgggctttttccgccgacaacctcacccttctcatttcgttccacatccaccagctgtgtttccgtatagaatgtttcatcaggaatgctgtaccagccctcatactcatccaggtaaatgtcaccattatcgagaagtttttgaaacactttctcgataatttctttgtgccggctttccgtcgtccggatgaaatcatcgtgagaaatgtcgagctgcttccatagtttctggatttcagcaactgcgcgatccacataagcttgaggcgtgatattctcttcctccgctttctgctggattttctgtccgtgctcatccgttccggttaagtagcgtacgtcaaatccttttaatcttttgtaacgcgccatcgcatcgccggccacggtagtataagcatggccgatatgtaattttccgctcggataatatatcggggttgtaatataaaaagtattattgtcttgcggcatgttgcaacctcccattcagaatgtcgaaaagctcacgcccaaaggacgagagcggttttatttgatatacaatattgatatttgtcctctatctatgataccatcttagcctttaagatcaaggatatatacgtactgcgcgtaaaagagtaaataaaattaaaaatttttattgaaattaaaaaaagtcttaacatgtcgaaatttgtcgtatataatctactaatataaaacatcttggttcgaaagtcttgatttaaaaggattttcagtaggataataggttcgaaaaagcagtcaaaaagcctgttatttcaggatttccaaggctttacttactataagaactaattcttacaatcaatagtaaacaaaaagattgacgattattggaaaccttgttatgctaggaatgcaaggaattttgtcgaataatgacgaagaaaaatataaactacaaaataattatctctcgggaggagactgttaatgaaatctactggtatcgtacgtaaagttgatgaacttggacgcgtcgttatccctatcgaacttcgccgtacactgggcatcgcagaaaaagacgctcttgaaatttatgttgatgatgaaaaaatcatccttaaaaaatataaaccaaacatgacttgccaagtaactggtgaagtttctgatgataaccttaaacttgccggcggcaaattggtactcagcaaagagggcgctgagcaaatcatctctgaaattcaaaaccagcttcaaaaccaaaaataagctatttcatacaaaaaccgttcttgttacgatacaagaacggttttttttatgattgaatgtgataagcgtcataaatctcgcgtttcggaacgccccgatctaccgctgtttgttttatggcctgtttggaagatgctccttcgtttatgtaatgctccacatgctctttctcagaaagctccgtccaccaaggcttttcctcttcatccggttcagcggtttgatttccttcgacaacgagacagaactcaccgcggatttgatcttcatttgcccattccatcacctcggcgatggttcctctgatgaattcctcatactttttcgttaattctctcgtgacggcgatggttcgattacccaaaacatcatgcattgctgttaatgtttcttttaatctgtgcggcgcttcgtaaaatatcatcgtttcctgccgttttttcaggatttcgagttctttcttcttttcttttttctgtctgtttaaaaatccgtagaagaaaaacggctgcggagtgatgcctgatgcggtcagcgcggttaatgccgcattagcacccggaagcggaacgacatatccgccgatttgggtgaaatctctcacaatctcagcccccgggtcggaaattgtcggcatgccggcatcactgaccaatgccacattctttccgtttttcagccattcaatgattttatggccgctgctttctttattatgttcatgatagctgatgagagatgtttctatatcataaacatggcacagctttttcgtctgtctcgtatcttcggcagctatgacatcggccgatttcagcgtctctactgcacgaaaggtcatgtcctccaaattgccgatcggtgtaggaacaaggtacagagttcccatttcagattttccgttaaaactcatctggcgtcttaacatatacagcctccttgctgcgtcgtttttcttctatatattgctcttttttctttcgggtcagctgcttaaaacggtattccgcctgcatcgcttcccgttttgtttcaaatgattccgcatggcataacgaaaccggcctccgcgcccttgtgtacttcgcgccctttccctcattgtgggttttcagccgtttttgcagatcatttgtataaccggcatacaaactgttgtcattgcacagcagcacataaaagaaatgactatttgtctccatataaaatcgtgcggatctctttcgtatattcattttgttcattgtatacgaacagcgggggaagaattttgagatcagggcggccgcctttaattccttcaaccaaaatggtattcgcttctttaccttgtttcggataaataaactgaacccgtttcggttctattcggtacgctttcattaattcaaagatttccaaaagcctccccggccgatgaacgagagccgcttttccgccttgtttcagcagtttgctgctgacggaaatcacatcttcaagcgtgcaaaggatttcgtgccttgcgattctgagatgttcgttcaggttctgctccgcctctttcggtgttttaaaataagggggattgcaggtgacaacatcatatttattatgtccgagtctttccggcatatttttcagatcatcatgaatgagactgatctgaccgcccagcccgttgtattccacgcttcggagcgccatatcatacaagcgttcctgaatttcaaccccggtgatatcggcttttgaccttgtgctgagcaaaagcggcacaatgccgttccccgtgcataaatcaacgatgttccccttttgaatcggaacgtatgcaaacttagacagcagcacggcatctaatgaaaaagcgaaaaccgtcggactctgtactattttcatatcctctgctaataagtaatccaatctttcatcatcacgtaatgaaaccataatcttattcctttcggcactctttgaaaaaggcttccgacatcagcggaagccttttccttattttttatttaagaaggacagacaaaaaaggcaatctcccttgcggacgcttccataatggacgttgcaaatatgaaagccttcttgatacagccgggccagattgtcgtacccttctcctatatcactctgctctgccttctgtgtttttgtttctttctgatcggctttgaatttctcaatttgctctgtcgtatcatcaagccgcttacgcaaatgcttattttcaagctgaagatggtgattctcttcaatcatttcgccgatatgctgctttaagtcacctagctgacggtacagcgaaccgatttgttcctccaggtttatgacagtatcaaataactcttttttatccaaggttccacacctcgttaatctgtggtttgtgcggatacgacgccctcttccaagagctcttcccaagtatattctatcactttttcacgattcttcagttccacctgaagcacccgttccagaatattaagaccgacaacctttgcggggccgtttgccgtcgtaatcatttcgcctaaatccggcagctgttcttttgccgtctcatactcatcattttcgtacttcaaacagcacatcaaacggccgcacagaccggaaatcttcgttgggttcaacgataaattttgatccttcgccattttgatggacaccggttcaaaatcaccgaggaacgtggagcagcaaagcattctcccgcagggcccgataccgccgagcattttcgcctcgtccctcaccccgatttggcgcaattcgattctcgttttaaagatagaagccaagtctttgaccaattccctgaaatcaacccgtccgtctgctgtaaagtaaaaaataactttattgcggtcaaatgtaaactcaacatcaaccagcttcatatctaagccgtggtcagccacttttttctgacagacttcaaaagcggacagggcctcctgtttgttttcttctacaatgagaagatcgcgttcatcagcaacgcgtatgacctttcgaagcggaagcacaacatcatgctcgtccacttgtttatttgcgatgacaacctgcccgtattcgacacctcttacggtttcaacaatgacgcagctgtcttgttctatatcaaatccgttcggatcaaaataataaattttccccgcttttttaaagcggacgcctattacgttgtacaagcttatccctcctgcaacgttaacaccaagtgctccattaatccctgcacattcacattggaatgaagccgtttttttgcttctaaaacagcgagaatttggttcgtaacgctttgttgtgtaaattgcagcgcatgctgttttattgattggaataagtcttgataaatcagtttatcttcatttccaatttggatggataatacatcacggtatatcaataagagcatatcaagacccatttcttgatgggttttttctttgaaaaagggcacccactgatcctgaatgaagaaaaaggcatgtcctttccgctgatgtaagacttcatacaattttatcactttcgctctggactctgcaaactcatcatttcgacttaattcgactgcttccgcaatattatttgtcatatttgctaagagccgggccatgtgagggctcacttcctgttcaatcagtctttcttctatggctttcggctgaagcggctggaacggaagaacctgacatctcgaaacgatggtatccagtattcggtggagctgctcagtaataagaattgcgatggtgtcttgactcggctcctctaaaaatttcagcagactgtttgctgcatttgtcgtcatttgatccgcatgggatataatgtacagctttttatgcgattccagtcctgttttagaaaactcttcctgaagcgattggatctgagcctttttaatggataatccgtcgggctgaaccacatggaggtcgggatggtttccggattcaatacgcttacagttccggcactccccgcaaggctcagtcccgtcttcaaggcaaaaaaagctttttgcgagaagcagtgcggcatccaatttgcccgttccttttttgccttcaaacagatatgcgtgagaaagccttttcttttcaatgctgttatgcaaaagccgcatcactctgggctgctgcccggtcatttccttccatgatattgccattgtatcactctctatgtgtaaaggttaatcaataaaccttttatttctccgattcgatccagcaaatcaattgccggtttttcctgatctaacatttcttctgtcagctgaagcagtttttcatctatttctttcacaagccccagagtccggctgcttccgtacaggtcaaagcttttctccgtctcatgcgataatccgctgtctacggcctcttttacaaaacgttttaccaatcctttgaatttcgctaagtctttgaagtttctcgacttcgtcagccttttcccgaacgtttctatatccgttaagaacctgctcagctgatcaaatttcagcttgctgctttggctgtccattgaacttttaaatgttccggaaagctctgccgctttataagcaggctgctgctttttctcaataaatgtacgtaagtcagaatttattttcacgtcgtcaaatccttaaaattgatgaaattcatcgaccgggaggacaaagaccgtcgctccgccgacttccacttcgacgggatatggaacgtaggaatccgcattcccgcccatcggggataccggggcaatcatctgatcacgtttacagccattctctttaatgaggctgagcgctttatcgacacggatatcttccaccccgatcataaacgtcgtattgcctgatttaaggaatccgcctgttgtcgcaagcttcgtcaccctgaagttgtggtcggttaatactttcaaaagcctgttgctgtcctgatcctgcaccactgccactattagtttcattctctaggccccctttaggttggaaagaacattatcgttacattcattatagcaacttatgagaaacaggtcacaactgaatttttttcaatgcttcatttatcacttgaagtgcgtcctgaatgacgagttccttctttttcgatgcgtcgattgtatggaatctttccggaaaacgctgcattaccttttggtatccttcccgtactttcgtatgaaagtgcagggcctcaagatcgagacgattcttctctcttgaatcattcgacgtaatccgtttcaacccttcttccggctcaatagaaaaatagatggtaacatcgggcatcgtatcgccgattgcaaactggttaatagaaaggacttcatcaatgccgagccctctcgcatagccttggtaagccagcgaactgtcgatgaaacgatcacacagcacaatgcggccttctttcaatgcaggctgcaccttttcgactaaatgctgccttctcgccgcagcgtaaagcagcgcctccgtttttgcatccatcagtgtattgtttttatttaagatcacttctctgatctgttccgcaatgtcgatgccccccggttctcttgtcgctgtcaccgggagcccctctgccgacagaatctctttcatttcctgaagcacagtcgttttccctgcaccttcaggaccttcaaatgttataaataaaccgctcatgatttctcctcttctatatagacaagtaattgttccccgtttaacaagccttgaatatgcgcgtccatgccgattaaacgggaaagcttttgtacgatctcttctgttatccgttctccgtccatgatcagcggaattcccggcggataaggaataatgttgcccgcatgcaagcgcccggccgccttatttatatctgcaggctcttttgtaaacttccgcatctcattttgcggatattcaagtgtcgaaatggacggaaatgtccaattcacggcatccggcaatttatcgggcggtgtattctccagtttctgctgtatgtttcttacggttgcctgttctatcatccgccggccgcctatcggcagtacgagcaatacttggtactcgtcagccagctcggcaacaatgccttcactctccaaaatccgttgtaatgaatagccggaatgtccgagctttgaccgaagaattaattttaacgggtctgcccgcagcccatatccggaaggctcgattatttcaatagaagaaattgatgcgaaccttcgtttgattttctcaatgtgctccatatgaacgggaagtgtccctttttcagcaatatcctgcacataagcgcgcgccgtatctaaagatgccataatcgggtatgacgggctgctgctttgcaaactgcttacataataagttaatcgatctctgtcaattctcgtgctgttcaaatgaaagtaagaccccatcgtcatagccggaagcgttttgtgagccgattgaacaacggcgtctgcccccatagccaatgatgaaggcgggaaaggctggcctaacacaaagtgagccccatgagcctcatccaccagtacaggaacgccgtatgaatgggctttgttaactgccgcggtcaaatcggcggcgtgtccgtagtaagtcggattggtcagaacaagtcctttcgcgttcggatatgacgccagcgctttttcgatgactgaaagggatacatgtgccggcacatgcatgttttcatcgatttccggcgccaaataaaccggcttggctccggccaatgccaccgcatggaaaacagacttgtgacaattacgctggatcagaatgggttcacccggttcacacacagctaaaatcatcgccagattgccggcggtcgttccattgacgagaaagaaactttcctgagagccgtaaaatctgctcaccaaatcctgcgcttccttaatgacccccgtcgggtgatgcaagtcatcaagacccgtgatctcagtcatatcaatagataaaagagattgatatacagatttggcttcatcaaaaaagacatctccattgtgatgtcccggaacatgaaaagaatacgtatttcggtgcgcatgcttcatcagcgctgtatataaaggtgtgtccatttttaaacaaatcctttgcctgtctttcttattatatcgtgcctgcgagccaacttaaagctaagactttttgccatctagccgttatcccggccggacctcatatcaagcagcttcttttttaaatcgccttccatgataacaagctcctcctcggcacgcctgcgtttcatcctgccttcttcttgaatagacatgatttcttcaagtgtgctgactaagctttcctgcacttttttgagggtttctgcctcaacaagtccgcgctcattggctttcgctgtctcgactgtacttgttttcagaagttcagcgtttttcagcagcaattgatttgtcgtatctgccgccttctgctgcacatctgccgcactccgctgcctcataagcgtcagcgcgatggcgacttgattcttccataaaggaatagccgtaacaatggaggactgaattttctctgccagtgcctgattcgtgttttgaatcaggcggatttgcggcgcactctgaagcgtaatctgcctgctcaacagcagatcatgcaccctcttatccagacggtcggcaaactggcgaagatcattcacttcctgcgcggccatttgattgtgttcttgtaattcggcttttcttgccgcttcgggtatcagctttgttttcagctcatctaattttaattcccccgctgctatatacatagttaaatcagtaaagtactgtttattttgggcgtacagctgatctaacaatttattgtcactcaacagcacatttttagaatgttccagccttctgctgatacggtcaatctgcacacttgtcttttgatatttcgaaagcacttcctgtacagaaccggacacccttttaaacagccgggcgaaaaatcctttgttcttcatctgcagatcatcggggtttacctggtcaagcttcagcatcaaatcagccagtatctgtcccatctctcctgcatcttttctttgcacgtgctctatcatcgtgtgggaaaattccagaagattcgcctgcgcctgtgaaccaaacagaacaatgctttgcatgttctcagggtccagtttttcagcgagccgaagtgccgcttctcttttttcttccggcagcgtatctgcaagctttagaggggtctggtcattttgggcgcccatgctgtcgtcggaacggtctttggccatttccttcttcctttcttattttctcagtgaatgctttgccacatctaattcaaagtgcaggtcgtcgatgtcctccttcatcagttcatgaagatcctcttccagccttctggaaagctctgccagagtcatcctcgtatcactcaaggacattgataaatctttattttttcgcggctgtgaggagagcagagcatacttttccgtcagttccacaacagaatcaagcgtttgataatagaaacgctctgcctgataaaaacgcttcggctcttgctttgtgagcagatatattcgtcgggttatccgcagtatctctgcattctgcttcagcatttgtatacttttagagcgaaaaagcgccctgcgtaatcggatgattttaccctttgcttcctcaagattttccttgatataagcatattcttttcttgtcagccggtgtttttttaaaaagagacgcttcgcattccacaagccggccgcactgactgcggctccgccggctgccccgtataaaagcgaatacagaaaaggctgatgccctatcgtaatgaaggttatccccgctaatacaaaaactgtgctgccgcaaaacgtccatttcatatattgaataaacggtttcatacttgatcgactcctatttattcacttttatcagtattatctattacattccatgtctaaacaagttcctcttcttatcgtatcagttcttttataaaaagtgtaaaaactcctctgatttcaggcaaaaaaaagacccttttcagggttaagaatataacgtcggtgtatgaaggcttttcagtttacgaacgaaaaattcataattcggatcagaggtcggagtggaaactactttcttctcacactctaaacatataaatttcgtataaatatggattcccctgctttttttggtttcacacacaatacatgtttcttcatggctggacgtttcattcattttgcccacctccgtatgaatagccttcccttaagctgttgattgtatacacaatttggacctttttgaagtttgcaattagtatatgggcgtttccgtatttcggtgtttgttttgtttttgaataaaaacaaaaaaggcagctcatgatgagctgcctttaccgtaatgatagcttggcggcgtcctactctcacagggggaaacccccgactaccatcggcgctgaagagcttaacttccgtgttcggcatgggaacgggtgtgacctcttcgctatcgccaccaaaccattgagagtgttctctcaaaaccagataacagtaagcatacattcaaattggttaagtcctcgatcgattagtatctgtcagctccatgtgtcgccacact

SEQ ID NO: 11 - DNA, 25019 bp, Bacillus subtilis
gtgcacgcttgacgctgaaacggcatccggccttcaccgcattgcccgggatcacggctccactttgtatatggtgcttctcgccgcgtacaatacgctgctcgcgagattgagcgggcaggaagacatcatcgtcggctcgccgattgccgggcgtccgcacaaagaccttgaaccgattctcggcatgttcgtcaacacgctggccatcagaacggagccgaaaggagacaaacggtttaccgattacttggcggaagtccgccaggccgcgcttgaagcgtatgagcatcaggactacccgtttgaagagcttgtggagcggctcggcgtgcagcgggacacaagccgaaatccgctgtttgatgtgatgtttgtgctccaaaatatggagcgtgaatccctggtgttaaataaactgcatttggctcaagctgcggatacaagtcataaaaccgcaaagtttgatgccacgctttacgcgtcagaagggtctgacggttccatcagctttgattttgaattcaatacagatatctatcaaaaacagacaattgaaaaatggctttcttattttacccgtattcttacaaaagtaattgaaaaccaagcgatatcgcttggtgacattcacgtactggatgatgctgaaacaaatcgcgtcatttatcagtttaatcagacgaaaagcgattacccaagacacgaaaccatcagccgtttatttgagcgtcaggcaaaagaaacccccgatgcccgggcagttgtatatgatggacaaatcttgacataccgtgagctgaacaaacgggctaacagaatagcggcggctctccgatcaaatggcgtcggtccggaaagcgttgtcgcattattaaccggccgcacaacagagcttgcttccggaatcctcggaatattaaaagcgggaggcgcctacttgcctattggtgacgatgtgccgcgggaacgggctgaatggatgcttaaagactgtaaagctgatattcttctccaatctgataaacttgacggtctgccgctttcaggaaaacgtttattcatagaggatattcaaacaaaggccggcttgagttcggaaaatcccgaaccgctcggcggacctgaatcattggcctacatgatttatacgtccgggtcaacaggtgcgccaaaaggcgtcatgattgaacagcgaagcgtgatccgccttgtgaaaaacagcaattatatcgattttacgccggaagacagactgttgtttacttcatcattaggatttgacgttacgacatttgaaatattcggtccgcttttaaacggcgcttctttatatgtaagtgaccaggaaacctatctcgactctgatgttctggaaacatttatacagcaaaacggcattacgacactgtggctgacatcgtctttgttcaatcatctatcagaacaaaatgaacacgtgttttccggattatcccgattgattattggcggggaagcactgtccccaagtcatgtaaaccgggttcggaaaacgctgccgcatctttcaatatggaatggatacggaccgactgaaaacacgacgttctcgacttgctttttgattgaacaatcatacgatcattcaatcccgatcggccgccctgtcggaaattcaactgcttatatcataaacagcaggggaacaccgcagccgatcggcgtcatcggcgaattatgcacgggcggagatggtgtggcaagaggatatttcggccgccctgagctgacggaagaaaaatttgtccctaatccttttgttcccggagaacggatgtaccgcaccggagatttagcccgctggctgccggacggaacgatcgaatatgccgggcggatggatgatcaagtgaagatccgcggttatcgggtcgagctgggagagattgaagccgcactgaggagcctggacggcgtgaaagaagccgccgtgtcagtcagaaccgggcagtccggcaataaagaactgatcgcatatatgagtctgcaggcggacatggatacagaaaaagtgcgttcttcactgtctaagcaactgccgaattacatggttccggcctatataatggaacttgagaagctgccgcttacgccgaacggtaaattggatcggaaaaatctgcccgaaccggagctcgcgcttcaaaccgcgtacacagctccccgcaatgagcttgaagaacagctttccgtgatctggcaggaagtgctcggcacaaaacaagtcgggattgaggactcattttttgagttgggcggcgattcaatcaaagcgctgcaagtttccgcacggctcggacgctatgggtggaaaatgacggcaagcgacttattccggcatccgtccattaaggagctcgcgccgcttatccggaaagcggaaagagtcatcgatcagcggccggtggaaggagacataccttggacacccgtccagcactggtttttatcacagcggatggaaaacagaaatcatttcaatcagtccgtcatgatgttcagctctgacgcattgcataaacagccgctcaaagaagccttagagcatcttgtcattcatcatgatgcactccggatcaccgtcagtgcagaaaacgaaagtttcagacaaatcaatcacggtattcaaaaagatgaactgtacaccttggacatttgggatctgtctgagacagatacttgggaaagagaaatagaaactgaagtggctgcgctccaacagcggatggatattgaaaaagggccgttattaaaagccggctggttcaaaacccggtccggggattatttattcatcaccgtacatcacctggcagttgacggagtgtcatggcgtattttgctggaggatttatctgccgcttacactcaagccgtaaaaggtcagccggtccagcttccgccaaagaccgattcgtttaagcaatacgctgaaaggctttcagaatacgcaaaaagcagcaagctgatgcgtgaagaggaatattggcgttttattgaagaagaaacagccgccgaacttccttatgaaaaaccgcagcatcagacgggagccgacagcattcggcaaacggtaagctttacgcttacagaagaagaaacgtccgttttgcttcagcaggtcaaccgggcctaccataccgatacgcaagatattcttctgactgccgcagctttggctttacgggactggacagggggcggcagactgcgcatcgcgatggaagggcacgggagagagcacatcatgccggagctcgacatcagccgcaccgtaggctggtttacctccatgtatccggtgctcattgacttgaacacagcaggcgctgagcttggaacggcggtaaaaacggtcaaagacacactcggaagaataccggataaaggaataggctacggcattttaaaatacatgacaccgcctgaacaaaaaacaatccgcttcagacaagcgcctgaaatcagctttaactatttagggcaattcaatgatacagaagatcagcacacgttcagtctgtccggtcttgcaagcgggcacgacatcacgccgacatggcagcgggaacaagcggtggaaatgagcgcgatggccgcacaaaacaaacttcacttcagtttgagctatccgccgagccgcttccgcaaagaaacgatggaacagctgctgcaaactttacagcaatatttgcgtgatattatggcgcactgcaccggcaaagaggaagcagaaaaaaccgttagtgattttagcagcaaaacgttaacatctgatgatttggacagcatagcgagttttgtcgaggaactgtagaaaaaggcgacggggagattataacatgacaaaaaagaatgcaattcaggatatttatccgctgtcttatatgcaggaaggaatgctttttcattccctcctgcaaaaggaatcacaggcttacgccgagcaggcctccttttcaataacggggaaggttgacacccgcgtgtttgaagagagcgttcatgcccttttcgaaagacatgatattttcagaacgatctttatcagccagaacgtgtcagtgccgcagcaggtcgtattaaaagagcggaacgtcagcatcattgagaaaaatctcaccaatttaaacaaggctgatcaaatcaagcatattgaagaagccaaacgaagagaccgtaagaaagggtttcatctgcaaaaagacatgctgatgcgggtgacgctgcttcaaaccggtgaatgtgaatatacgtgcatatggagtttccatcacatcattatggatggctggtgtctcggaatcgtgctgaaagagttcttccagatatacgcctcgcggctccgccggacaccgttaacgcttgagcccgctgtgccgtacgggacctacatcaagtggctgatggagcaagataaagaaaaagccgcttcgtactgggagcggtaccttgaaggctttgagcagcagactgtactgccgaagcagaaaaaagccggcgaaagcagacaagaggaagtgacgttttccttttcaaaagaggacacggctaaactgaaagagctggccgtaaaagaagaggtcacgctgagcaccattttccacacgctctggggcattttgctccaggcgtataaccagacagaagatgcggtttttggttctgtcatttccggaaggccgtctgaaatcgaaggcatcgagcgaatgatcggcctgtttattaataccgtgcctgtccggatcagcggggcaaacatcccgtttcaaaagctgatcaaaaacgtgcaaaaggacgctttgaaaggacaggcatacagctatcatccgctttatgacatacaggcgaattcacaggtaaaacaaggcttaattgatcatattcttgtctttgagaattatccggttgaacaggagcttgatgtgctgaacagcaagggggacacgaaagacctttttcacatccatgatttcagcatggaagacgaaaccaactacagtttttacctgatggtggcgccgggtgacgagattcatttgaaaatgagatacgattcaagcgtgtatgaccgccaatttattgaaaatatcaaaggccatttggcacatatcgtctcccaagttctcgacaaaccggacatcacgccggacaagcttgcaatcatcactccaggggaaaaagcgcagctgcttgcgccgatttctgaagagaccgaaaagcctgaatatgacacggttcatgcgatgtttgatcggcaggccgcaaaaacgccggatcaaatcgcgattcggtatgaaggcgagtcagtaacgtacaaagagctgaacgaatcggctaataagctggcccgcctgctgcaaaagcgcggattaaagcgggaggaaccggtaggcgtcatgctcggccgttccccttctttagcggcggccgttctcggtattttaaaagcgggcggcgcctttgtcccgatagatccgggcagtccaaaggagcgtattcgatatgtcattgaaaacagcggctgcgtccatgttgtaacagagcggcatcagtcagtgcccgcggaacaaacgctgcaggttacatacatagaagacgccgggacggaagcggacggaagcaatgtgcaatccattaatacggccgatgaccttctttatatgatttatacatcgggaacgacagggaaaccgaagggtgtgctgctcgaacataaaaatatggccaacctgctttctcaccaattgacgaacacagacattgatttttgcacaaatgtgctgcagtacgcatctgtggcgtttgacgtctgctatcaggagttattttcagtactcttgagcggcggcaccctttgtatcgtgcccgaatcaatcaaacgagacgtttctcagctgttttcgtttattgatcagcacaacacggaagttgtgtttttcccgactgcgtttgtcaaaatgcttttcaatgaagaaggttatgcacagtcttttccccgctgtgtgaagcatgtcattacggccggggagcagctgaccgtttcgcgtttgttcaggcagacgctccgtttacacggtatgcatctgcataatcattacggcccgtcagaaactcatgtggtttcaacgtatacgatttctgcgggagatgacatacctgaacatccgccgatcgggaaaccgatccatcataacaagatgtatattctcagcaaaaataggcagcttcagcctctcggaattgcgggagaattgtatatttccggcgcgaatacaggaagaggctatgtgaacaatccggcgctgaccgaagagaaatttttgccggatccgttcagaacggacgccgtcatgtaccggaccggagatttggcaagactgcgtgcggacggccaaattgaatacatcggccggacagatgatcaagtgaagatcagagggtaccggattgaaccgaaggaaattgaaaccgtcctggcaaatcatcatgccgtgaaagaagctgccgttctgattcaaacgaatgagtcgggcgaaaatgaattatgcgcctactgcagcgtctcacaagcgactgatccttctcagctgcgaagtgatttggcgaaagagctgcctgattatatgattccggtcaaatgggcttttgttgactcgattccgctcactgcgaacggaaaagtcgatcagcgggcccttccggaagcttcggcatacgcagcgggccgtcaatatacagctccccggaatgtgacggagctgaagcttacccgcatatgggaagaagtgcttcaaagcggcccgatcggcgttcacgatcactttttcgagcttggcggccattcattaaaggcgacggcactcgttgcaaaaatagctaaagagtgcagtgtgcaaatcccgctgagcgatgtcttcagccatccgactgtagaagaactcgccaaaatcatcagtgaagcagaagagaacccgttcgcatccatagaaaagacagaaacgaaagaaacatatcctgtctcatccgcccaaaaacggatgtacgtccttcaccagcttgaaaatggcggtgccagctataacattccagccgttttagaggtgaaggggccgtttgaccgagacaggatggaagccgtgttcaaggaactgatccggcggcatgaaccgcttagaacatcctttgaagaacaaaacggcctgcccgtgcagaggattcatgacgacgtgccgttcgcatttacaaaagaacaatcagccgaagcgtttatccggccgttcgatctcggcaaagcgccccttttccgggcgggatttgtccaaatagaaaaagaccggcatctgcttttagctgatatgcatcatattatttcagacggcgtatccgtcaatcttttgatacgtgaattcagtgagctgtatgctgagagaagtctgccgccgttacggattcaatacaaagattatgccgtctggcagcaatcatttatggcgggcgccgcatatcggaaacaagaggagtactggctgaaccggcttgccgatgagattcccgtgcttgaattgccggctgataagccgcgtcccccggtgcggagcttttccggagacagggtgtcatttgtcatcaatgaaaaacatacagctcagttgaaaaagctggcgaaagaaaacaaatgcacactgtatatgacgctgcttggtgtgtacacagttctgttagcccgtttaagcggacaggaagatatgattgtcgggtctccgattgcaggaaggcctcatgccgaccttgacgccgttctgggcatgtttgtcaatacgcttgctttcaggacgcgtcccgacggaagcatgacattcaaagaatatttaaaggaaattcgccaaacagcgcttgaggcttacgaacatcaggattacccgttagaagagctcgtcgataagctcggtgtgccgcgtgacatgtcccgaaatccgctgtttgacacaacatttgcgctgcaaaatatggaacagcagaagcttagggcagccggacttgaactgcagccggcagacgtcagcctgccgatttctaaatttgacttatcgctgtacatctctgaaaacgccggtgaattgtactgccagtttgaatacagcaccgatttgtttaagagaaaaacgattcaaaaatgggcgggattttttacgacacttgccgaaaacgccgcggctgatccgggcttggaattagacgatatttctgttttgacagaaaaagaagaagagtctctgcttcaagatttcagccccttgcagaaaacagcgtttccgcttcatcagcctcttcatgatctgctggaacagcaggcggaaaaaacgccggaccgtccggcaattttaactgatgacatttcgattacgtatcaggaactgaacgaaagggcaaacgagcttgcgcaccagctgatcaagcgcgggataaggctggaggataaaactgccattatgggccggcgttctcctgacatgctgatcggcatttacgctgtcttaaaagcaggcggtgcatatctgccgattgatccggattacccggaagagcggattcgctttttactgaaagacagcggcgtgaaattcttactggcagaaccagaacttttcgcaccagatctttttgagggagaaacgatctctctgaaaagcggacaaacaggaaaacctgaagctgcggccaaccctaacgttccggtaaaacctgattcattggcttatatcatctatacatccggttctacgggacgcccaaaaggcgtgcaggttgaacatcggtcagccgtaaactttttatactcactgcaaacgcgttatggattaagtgattctgacatcattttgcataaaacatcatactctttcgacgcttcgatttgggagctgttttggtggccgatcgcgggagcttctgttttcctccttccgcaaggcggcgagaaagaccctgaaatgatactgaacgcattggagaataaccgcataacggcggctcattttgtgccatccatgcttcatgctttcttggaatatataaattccagaaaacagccgatcaaaaaaacctgcttaaaaagggtttttgccggcggcgaacaactgggcccgcacctggtttcccgttttcatgaccttcttgcgggaacggaattgacaaattcctacggtccgacggaagcgacagtagaagcggcgtactttgatttgccgcaaggaaaagaatttcataatgttccgatcggcatttccgggcataacatgcggctttatattttaaatcaaaagaaacagcttctgccgccgggctgtatcggagagctgtacatcgcggggacaggggtggcccggggctatctgaaccggcctgagctgacggaggagcgctttctcaatgatccgttttacccgggagaacgcatgtatcagacgggcgatatcgcacgctggacagaagacggcctagtcgaatggctcggacgttcagacggacaggtgaaagtccgcggctaccggattgaaccgggagaaatcgaagcggcgatccggcgcatcgacggcattcgtgaggcggcggtcaccgcccggaccgaacacggtgaaaccgcgctttacgcctatatcgaaggacgggaaagtgatgatgtgcgggcggagcttgcgacacgccttccggcctacatgatgccggctcagtttatagagatgagcgaatggccggtcacgccgagcggaaaacttgaccgccgcgcgctgccggctcccggcggagcggcagacagacaggcgtacaccgccccgcggaacgtcacggaaatgaagctttgcgccctttgggaagaggtgctgaaaaacggccccgtcggcatccgggatcacttttttgagcggggcggccattcgttaaaagcgacggctctcgtctcccgcatcgccaaagarttcggtgttcaggtgccgttacaggacatcttcgcccggccgacggtggaagagctcgcttcggtyattcaggayttggaagagagcccgtatgaagcgattcagcctgcgmaaaaacaggacacctatccggtgtcttcggcgcagaagcggatgtatgtgctccagcagcttgaagacggcggtgtcggctacaacatgccggctgtgctggaactgacgggccggcttgaccgygtccggctggaggagacgttccggcagcttgtggagcggcaygagtcgctcagaacgtcctttgaaacggggcctgacggcgaaccggtgcagcgcatccatgacagcgtrccgtttcagctsgatgaggccgagtcasctgacgcattcgtccggccgtttkgtctggaggaagcgccgctcttccgtgcggcyctcgtgaaagaatcggaygaacgtcatcttttattaacggatatgcatcatattatttctgacggtgtgtccgtcaacaccttgattaaagaattcggcgagctgtacgcaggccgttcgcttgcgccgatgcgccttcaatataaagactatgccgtctggcagcgrtcgtttcaggagaaagaaggatatcagaagcaggaagcstattggctgaagcggctwgaaggagagcttccggtgcttgagcttccggctgacaagccccgtccggctgtcagaagctttgcgggcggcagcgtatcgtgcacgcttgacgctgaaacggcatccggccttcaccgcatygcccgggatcacggctccactttgtatatggtgcttctcgccgcgtacaatacgttactcgcgagattgagcgggcaggaagacatcatcgtcggctcgccgattgccgggcgtccgcacaaagaccttgaaccgattctcggcatgttcgtcaacacgctggccatcagaacggagccgaaaggagacaaacggttcaccgattatttggcggaagtccgccaggcggcgcttgaggcgtatgagcatcaggactacccgtttgaagagcttgtggagcggctcggcgtgcagcgggacataagccgcaatccgctgtttgatgcgatgtttattcttcagaatatggagcgagaggagataaatctggccggtctgaaggcgtcacgatcagagcataccgaacatgatgtatcaagttttgacctgaccttatcagcggctgaatccgatggaaacatccgctttgaaatggaattcagcaccgagctttttatgaaagaaacgattgaacgatggatgggccacttactgaatctcttgcgccatgttgccgccgaaccggaagtcatactatcgaaagctgacattttggatgaagaagaaaaacaaaagttactgattgagtttaataacacacaaaccgaattcatggaaaaacacaaactgttgcaccagttgtttgaagagaaagcagaagaaacgcctcatcagaccgctgttattgaaggagcacagcagatcagctattcgcagcttaatgagcgggcaaatcggcttgcgcgaacactgcacaaaaatggattcggtccgggaaaaagagcagctatattggcaaaccgttcgattgaagcgatcgtcagtgttcttgccgtcatgaaatcgggaggggcgtatataccggttgactcccattatcccgaggaacggattcgctatttattaaaagacagcgcggcatccgtcttgatggtgcagtcagaatacaaagaacttgcttcacagctgacggataacaatttatttctcattcagcttgatcatgaagatcaatacgatatttgtgcaaagaatattcagccggcagcgtcaccggatgatactgcatatatcatatatacttcgggaacaacgggaacgccgaagggagtcgaagtcagaaatcgcagctttacgcatgcagcacttgcatggcgcaggatttatgagcttgatcttataccggtcagagtgctgcagatggcgagtttctcatttgatgtattttcaggggatcttgcacgcgccctgctaaacgggggaacgcttgtcatttgtccggatgacgtccggcttgagccacaacagctttatcggctcattgatcagcaccgtatcacgtttatggagtcgacacccgcgctgattgttccgtttatggaatatatatatcgccggaagctcgcgctgcaaagtgtaaaagtactggtactgggttcagatatgatcaagtcgcaggatttttatacgcttcatgaacgctttgggaaagaaatgcgaattattaacagctacggtgtaacagaagcgacaattgattcttcgtattatgaagccgaaatgagcgaagagccgcgggaagatgatgtgccgatcggtgttccgcttccgaatgtgcaaatgtacgtcttaaacaaagacaaacaggtccagccgatcggcgttttcggagagctgtatatcggaggcgccggcgtcgccaaaggatattggggacagcctgagctgacagagggcgcattcagtgatccgttacaaacgggagaaacgctttacagaaccggagatcaggcttgctggctgccggatggaactcttcgctttcaagggcggattgataagcaggtgaagatcagaggctacagaattgagacgggagaaatagaaagtgtgcttttgaaacacgatcaagtcaaagaagcggcagttaccgtgatgaaagatgctgaaggacaagcccgattagcggcatacatcgttcctaaagaggccgatatctcatcacttcgccagtctcttatgcaggagctcccggcttatatgatgccgtctcatattatcggtttagacagcatgcccctgacactgaacggcaaacttgataaatcggcactgccggcagaagagatacattcaacacaggcatttgtcgcgcccggcgatgaaaaacaggagatgttatgccggatttgggaagatgtgcttcatgttcagaaagcgggaattcatcactctttctttgagcttgggggagattccattaaggcgcttcaagtgtcagcccgactcgccggagaaggctggaacatgtcgatccgcgatttgtttcagttcccgacgattgcagaactcgcgaagcacctcacgccggctgttgcaacggctgatcaggggccgatagaaggaagcgctccgctgacaccgatccagcagagattttttgaggagccgggtgcgtttgagcttcattataaccaatcagtcatgctgtgcactgaagacagcctccaaatagatgcgctgtaccaggcggtttgcgcgctgacagaacatcatgatgcgctgcgaatgactttcactgaaaatgagcatggggaagccgttcaatataatcgcggaatcacaaagcagcatgaagaaatatttacgcttaacgtcatagatatttcagaagaaacgcagcccgaaaaacggatagccgctgaggaaaaagaaatacagcaggctatgcgtcttgatcaagggcctctgcttcatctcggagtgttccggcagaaggaaaccgaccatcttcttataacgattcatcatcttatcacggacggcgtgtcatggaggatattgcttgaagatctgcagacagcttatcagcaggcgttggaaggcaaacaaatcgaactgccgccgaaaagcgattcttatatcaaatacgctgaagaactttttgacatttccaaaagcaaagcattgctggaggaagccgcatactgggacagcgtgatgtctggtgaaacagcgccgctgccgaaaataactgatgaaaacgccggacgattgcaggaaaacgcgcgcactgcatcgtggatattaagcagcgaagtcacgaagcagctgctgttggaaacacagcaggcatacggaacggatgttcatgaattgcttttaacggcgcttggaatggcgcttcatgattggacgggttccgaacagatccttatcagcactgaggggcacgggcgccaggggcatattcctgacattgatatgtcaagaacggcaggctggtttacatctgtttacccggtgcttttggatatgagagtgccgggcggctcaggcgaaaaaaccgctcaccgcataaagacggtaaaagacatgatgagacgggttcctcatcacggaaccggctacgggctgctgagatattcgcgaaacattctttataaagacccagaaataagctttaactatctcggtgcgtttgacggtcttgagggagcgctgaagatgtcaccgttcaagccgcagcatgatatagcggccgggcgcatccgcgagtttgatttggatattaacgcgatggtggcggccgggcaactggaggtaaaagccgtttataccgatgtatttgcaccgggggcaatcgagttcttcatgaatcgtttccatactcacctcgaggacatcatcgcccactgttccggcaagaaagagcgggaaaaaacattaacggattacagccatacagaattgaccgctcaagcactatcaagcattgaagatctcgtaaaaggactttaatttcataaaaaggtgtgtggcattcgtgacacaagcgacagaaattcaagatatttaccctttatcatatatgcaggaaggcatgctgtttcattcgcttctggattccggatcaaacgcatatgtcgagcagatttcgtttacagtcagcggggatttatgcattgatacattccaaaaaagtctggatatgcttatcagccgttatgatattttcagaacgattttcataaaagaagtgcctgaccttgaaggaccgcagcaggttgttctttcacgccgtgacacagccgtacagactgagaacatttcagactattcggaagaacggcagcaaagcatcattaaggaattcaaggaaaccgaccggaataagggctttgatctgcaaaaaggccccttaatgcgcctgactctttttcaaacgggagaaaaccgccatacatgcgtttggactcaccatcacattatgatggacggctggagcttgggcattgtgctgaaagatttcttcagcatgtattatgcgaaccggaacgggcggcctgtaaacctcggcagtccggctccgtacagctcttatatcaaatggctccgaagccggaataaagaagaaacgtcagcgttctggtcgcgctgcttggaagattacggagaagtcgtttccgttccgcaaacgaagaataagccggcgcaaaacggttatgcatctgagcattttcaattttcccttgagtctgaaaccgtgcaaaagctgacagacattgcccgaagcaccggggtcacgctgaatactttatttacgagcatttggggactgcttctccatcgttacaacggcactgaagatgcggtattcggttcagttgtttccggcaggccgtcagctatcgccggcatcgaatcaatggccggactgtttatcaataccgtgccggtaagggtgcgcgcggctggggatatgactttttcttctcttctcaaaaaggtgcaaaaagagtcactcgctgcggaagagcacagctattatccgctttatgacatccaaaacgaaagcggcctgcaaaaagatctattgaaccacatcctggtttttgagaattatccggttcagatgcagactgcggtaaacggctggaagcaaacggaaagcagtgcgctctcacttgaaaacttttcgatggcggaagaaaccaattacgatcttaacgtcgtcatcgttccgggagaagagttttatgtgaaattcagctacaatgcgggcatctacgatcgggaagacatgaaacggatcaaagggcatattctggaggtcatctcctgtgtaacggaagatccggacaggcttttatcaagcatcagtctcgtgcctccggaggaagaagccttgattcattcgtttaacgaaacgaaccgtccgtaccctgagacaaccgttcatgggctgtttgaagaacaggcggcaaaaacgcctgaccaagaggcgttgagatataacggggtaagctggagctacaagaaattaaatcagcgggcgaatcagattgcgcatgcgttaagggaaaaaggcgcacgccccgaccagatcaccgctgttatgctgcgccgatcaatgagtacggttgccgctctgctcggaatttggaagtcgggcagcgcctatatgccgattgatgcggaattcccgcctgaacggatttcatttttactgagagacagtgaagcctcactgctcgtgaccgaaaaggacctgctccccctcattccgccgcatttcaagggcagcgtcgtcatcatggaggaaacggtttcccagcagaccgcaccgcttctgccggtatctgacagcagaaattgggcgtatgtcatttacacctccggaacgacaggccggccgaaaggggtgcttgtacaacacaaagcgatcagcaatacattgcaatggcggcgtgaagaatacgggatgacagaaggggacatagcgcttcatcttttttcatacgtatttgacgggtcattaacgagtcttttcactccgcttctgtcgggcgcctgtgtattgttaactgatgaagatgatgcgaaagacgtcctttcaataaaacagaaaatcacccgccacggagtgagccatcttctgatcgttccgtctctgtatcgcgttctgcttgattcgctgacgaaaaaagatgcagagacacttcgggcggtgacatttgccggggaagcggccactcctgatatcgtggaagcgagccgcggcatatgcccgaatgccgagctgctgaatgaatacggcccgacggaaaacagtgtggccacgacgattctgcgcaacctgcaaaaaagcagccggattacgatcgggcgcccgattgccaacacttctgtctatatgatgcacggagatcggctgcagccggtcggagccgtcggtgaactgtgtatttccggaaaaggtctggcggacggatattttcagcaaaaagagctgacggacaaagtctttacccctcatccgtttcgtgaaggtgaacggctgtacagaacgggagatgcagcccgatttttaccggatggaacgattgaatatatgggacgctttgacgatcaggtgaagataagaggttacagaattgaattaggagaaatcgaaacggcactcagaagtctgtccggggtaaaagaggcggcagtcaccgtgcgcaaagcggcggacggggaacaggagcttgcagcttatgtcgtactggaaaacgcaggtgtgacatttgaccctcatgccgaattggccgggagattacctgcttatatgataccggggagctttaccaaattaacggagatgccgctgtctgtgagcggaaaacttgatcgggccgcacttcctgagccgaaagaagctgagagaaccggtgattatcaagctccgcgcacaatgcttgaaactgagctgctgtctatttggcaagaagtgctgaaacgggaacacatcagtacgagagatgatttcttccaaatcggcggacagtcgctgaaagccgcgtcgcttgtttcaaacatacataaacggctgcaaattgagcttgccgtccgccatgtttttgaacatccgacaatcgagagcatggcccgcttccttgaacagaggaaaagaggagaatatgcagaaatcacgcctgctgtggcaaaggacttgtacccgctatcttttgcacaaaaaaggctctatgcccttcaccagcttgcggcggacagcacgggctatcatatgcccgcttgtctggaactgagcggcagactcaaccgggatcgtctgcatgaagccttttcagcgctgttacaaaggcatgaagcgttacgcacatcatttgttttacgaaacggggagccgatgcagcacatacatgcacatgtcgatcttgacctcacagagattcacatgccatccgggaaccttcttcaagaggtgatggaaactttcgtcaaaccgtttgatgtggaaaaagcgccgcttttgagagtgactttagccaaagtcactgaagaacgtcattttctgctgcttgatatgcatcatcttatcgcagacggtgtgtcaatgagcgttctgattcaagaattgacggatttatacagaggaaaagagttgcggccgttaaaactccaatacaaagatttttccgtctggcagcatgagcggtttgccgctgaagaattcaaaagacatgagcgttattggctggagacgatcggggaaaacattcccgtacttgatctgccgctcgataaaaagcgcccgcagcttcctgatttcagcgggtccgttgttcgaacgcgccttcaaaaggaaacggcggagaatttacgccggctcatggatgagacgggttcgacgctgtatatgattcttttggcaagctactccttgttcctttctaaattgagcgggcaggaagacattgtcgtcggttcacctgcagccggcagaagccgcgctgagcttgacggggtcatcggcatgtttgtaaataccgtggcaatgagaagcaggccgaaaggggataagacattccgcgcttatttagaagaggtgaaaatgctcgccctcggcgcggccgaacatcaggacttcccgtttgaagaacttgcccaaaagcttgatacacaccgggaagtcaatcgcaatccgctgtttgatgccatgctcgttttgcaaaacagtgatgatttcgaagtgaaccttccgggcttagccgtttcttcacatgcagtgaagcatgacatttcaaaattcgacttgacgcttcatgccgaggaacggccggatggctcactggattttcattttgaatacagtaccgcgttgtttgaaaaaggtacgatcgaacggtgggccggtcattttaaagagcttttaggacaaatcgcatcgcatgatgagcggaagctgtctgacattcatttgctgggcataaacgagcggcagatgcttcttcaagcggaaaatcaaacggcggagtatccgaggcatgaaacgatcgtcagtttatttgaagcacaggcggaaaaaatgccggatcaaattgcagccgtcatgtccgacgagcgtctcacctaccgcgagctcaataaaaaggcggatcgaatcgccgatatgctgtcggaaaacggcatccgctccggacagattgtcggaattatgaccgaacgatctccggatatgctgattgggattctcggtattttaaaagcgggaggagcttatctgccgattgatcctgactatccggacgagcggatttcatttatgctgactgacagcggcgcgcgtgctctgttgacgcaatcgggtcttgggatatccggaatggacgggctgccggtattatacatcgataagcctgaatccgtttcagcagacagaacgaaagaaatgataacgcctgaacagccggcttacgtgatttacacatcgggcacaaccggaaaaccgaaaggcgttatgacggaacaccgcaatgtcatcagccttatcacacataaaggactgccgtttgatttcgactctgaagacgtctggacgctgttccattcctattgctttgatttttctgtctgggaaatattcggcgcgctcttatacggcggaaaggtagtcatcgtgccgaaagacacagcccgtgatccgcatttgtaccggcagctgctgcaaagtgaaggcgtaacggtgctgaaccaaacgccgacggctttttccggactcattcatgaagaggccgggcatacggacaagctgaagcttcgatatgtcattttcggcggagaagcgcttcagcccggcatgctgaaaagctggaaagagaagtacccggaaacggagcttgttaatatgtacggtattacggaaaccacggttcacgtcacatgcaaaaaactgaatatggatgatattgagagaaacaaaagcaatatcggcagaccgctggaaacccttcatgcttttgttatggacgcctatatgaatccgcagccgatcggaattcccggtgagctttatatcggcggggaaggcgtcgcgaggggatatgtaaacagggatgatttaaccgcctcccgtttcatcacgaatccgcacgtttccggcatgcggctctaccggacgggtgatatcgccaaaaggctcgcaaatggcgagctggaatatgtcgggcggaaagatgcgcaagtaaaagtcagaggccacagaattgagctgggagaaattaaatcagcgctgcaagagctttcctccgtgaaagaggccgccgtgatcacacgtgctgatcagcacggtcagcactccatttacgcatacgcggtcttacacgggaacgaaaagataaaagaagcagagattcaggcttctctcagagcttttctgccggaatatatgattcccgcccgcttgatagagcttgatgaactgcctctgacggcgaatgggaagctggacgagaaggcgctcccgcagcctgaattaaatgatagccttggagatgatatcagcctgagaaatgaaactgaagaaatgatggctgacatttgggaagaactcttaggtgttgaaggcctcggtcccaatgctcatttcttccatctcggcggggattcgattaaagcgctgcaagtatgtgcgaggctgaaacagcagggctatgaaacgaccgtccgcgagctgttcgagcatcagacactgggagaagtatcgatgcggctccggaaagtccgccgcgtgattgatcaggctcccgtcacgggagacgtgccgctgacgccgatccagcactggttcttgtcgcaatcattgccgcatgatcattttaatcagtcggttatgctccgcagtgcggacagaatcaatgaatctgctatgagaaaagcgttggcacagcttgcggttcatcatgacgcattacggatggtatgcggcacgcaaaacggatcggtgattcaatataacagagcggaaaacctttttgaggaagaactctttacgtttgaaacgcttgacgtgagagggaaagggtcattacaagaggagcacgccgcaattgaacaggcggccgcccgtattcaaacttccattcggctggagacggggccgctcgtagctgtcggattatttcacgctaatgatggcgatcatctgctgctttccattcatcaccttgtcattgacggtgtatcatggcggattttatttgaagatctcaccgcgtgctacaggcaggcgctcgaaggaaaagaaaccgcgcttccggcaaaaaccgattcctatcagacttacgcgaagcaaatttctgattatgcaaaaagccgccggctgttacaggaagcagactactggtccgaaagagaaaaagcggcggtcgaaccgcttccgaaagatgcccgcatctcttccaatcttctgaaagatacagatgtgatgaccgttacattgacaaaacaggagactgagcagctgttaacggaagcgaacagagcatacacaacagagacgggtgaattattgcttgccgcgttaagccttgcgctgaacagatggaccggaaacgagacattcaaaatcagcatggaaggccacggaagggaagagcacttggagcatcttgatatcagcagaaccatcggttggtttacgtcaatttatccggtattggttgacgcaagttttcaagatcaggctgatgacggcgagcggctcggctatcacattaagcggacaaaagacatgatgcgccgcattccgcataaaggagcgggatacggagtgctgaaatatataagcaaactctgggaaaagacggaatccgattctcctgaaatcagttttaactatctgggacagtttgaccgtgaaatccgttccagcggctttggtgtttctcccgtaaaagcgggaaatgaagtcagcccagactgggaacgtccgtacacacttgatatcagcggctccgtatcgtcggaatgtctcagcatgtatgtcgtgtacaaccgttttcagtatcaaaaagaaacgattgaagttttgacgggatattttcatgcctttctcaagcagatcatctcgcattgcacaggcaaagaggagcgtgaatggagcgccgctgatttcagtgacgaggagttaacgctggaagatctgagtgacattatgggggccgtcaacaaactatagaaaaggagtggcgcaatggggcagcaaccggaaatacaagatatttatcctttatcttttatgcaggagggcatgctttttcattctctgttggatcatgactcaagagcctacttcgaacaagcggtgtttacgatcaacggacagcttgaccgggaacgattccaaaaaagtatagatgctgtttttgaacgatacgatattttccgtacgacatttattcataagaatgtggcgaagccccgccaagtcgtattgaaaaacaggcctagccgcgttcagtttcatgatatttctcatttggacgagaaggcgcaagacaaatatgccgaccggttcagaaaagaagataaagataaaggctttgatttgcaatcagaccctctcatgagagtctccattttgaaaaaagcgcctgaacgctatgtttgtatctggagccatcatcatatcgtcatggacggctggtgcttcgggattgtcatgaaggaatttctgatgatctatcaatctctcggagacgggcggctcccgtctctcgagcctgttcagccatatggtaagtatattaaatggctcatgaagcaggatcgtaaagaagccgagattttttggaaaacgagacttgccgatcttgagcaaccggcgtctcttccgaaaaaatccgcggaaccaaatggcgaacttgagcaggcggttttcactatttctgaagagcagacaaatgagctgaagaacattgcggcaagggcgggagcaacgctgaatacagtgttccaggcactgtggggcattttgctgcagcgtgtcagccgctgtgatgacgccgttttcggttctgtcgtttccggccggccgtcggatctcgcaggcgtggaaaaaatggtggggctgtttattaatacgattcccgtgcgggtgaaaagcggttcattttcttttctggaactcgtcaggcatttgcagcaggagacgctgcaagcagaagcgtacagctattatccgctgtatgacattcaggcgcaaagccctctgaagcaagcgctgtttgaccacattatcgtgtttgaaaatgtgccggcccagcgtgaaattgaaaatgtgagtcaggccggttcatttgattttgcggtagaagatttctcgatggaggaagtcacaaactacggatgcagcataaaggtgattccgggaaattctctttatatccgcttaaactttgataccggtatatacgatcgtgtttttatgaagaatattgaaacatttttacggcatatgatgaagtcagtcatttccgaccctgaaatgagcgcctccgagatcgcattgctggatgcgtgtgaagccagaaatatgcttgatgcgtttaaccgtacagaaacggttgaaccgccggctccgacgcttcacgggctgtttgcccgccgtgccgcactttcgccgcatcgtccggcgctccgttttccgggcggcatgctgacgtacgccgagctcgatcaatacacagacaggctcgccgttcagctccgccaaaaaggcgtccgcaaagaaagcatggtcggtgtgctcgctgaacgctcgccggagatggtggtttcagtgcttgccgtgttaaaagcgggcggcgcctacgtgccgcttgacccggagtatcctgaggacaggctgcgctatatgctcgatgactgcggcgcttgtctcctgcttgcacagccggggttatccgtttccggtttttccggcgagacgcttgaagtgtctctttctgctctgacaggcgagacggagacaggggctgtctctgacgaagcggatagcgattcgctcgcttatatcatttatacgtccggttcgacgggaacaccgaagggagtggctgttgaacaccgtcaggccgccgcctttttatcagggatgcaagggcagttcccgttgacggaagaggatattatcgtgctgaaatcatccttttctttcgacgcttccatctggcaattgttttggtggacgatgtcaggcgcctccgtgtatctgcttccggccggctgggagaaagatcctgtgcggatgattgaagcgtttgcctcagaaaaggtgacgaccgcgcattttattccggcgatggtcaacagctttttagacgcgctggaaacagagcctgcggaaacaagaacacgcctcggcagaaccttgacacgcgtgtttgccggaggcgaagctctttcaccgcttacggctgcccggtttgccgatcttctgccggagaccgtgctcattcacggctacgggccgacggaagcgacggtggatgcggcgttttacgtctgtgaccgaaaacgggacagcggacggacgcggcttccgattggtaaacccgttccgggtgcccgtctgtatgtattagatagcggaggaaccatccagcctgcgggcgtggcaggagagctgtacatcgcggggacaggggtggcccggggctatctgaaccggcctgagctgacggaggagcgctttctcaatgatccgttttacccgggagaacgcatgtatcagacgggcgatatcgcacgctggacagaagacggcctagtcgaatggctcggacgttcagacggacaggtgaaagtccgcggctaccggattgaaccggg

SEQ ID NO: 12 - DNA, 24897 bp, Bacillus subtilis
ttacgctggctgctgaagacttgcccggcgggaaaacgggtgtaaggctcaaacagatcgtttggctccgtccggtgacggcgctttctgaaggagtgacgcttcatgtaaagcttcagccggaagaaaacggagacattgcttttgaagcgtatgccgaaggagaagagccgcttgtctttttccagggaaaggccgtgctcgaagagacggagcgtgctcckgtwctcgatgtggaagcggttcaggcgcgctgcagcggccggcgtatgtcaaaggctgagtgctatgaagcgttcgacagcctcggcatcacctacggaccgtckcatcaggcgcttgacgccgtctatgccggaarcggagaagtgctcgcgaagctcactcttccgccgtccgcccgcgaagaaaaggagccgttcatcctgcatccgagcatgctggacgccgcccttcaggcttctatcggtctcgtgctctcagacggttccgcgtccggacggccgtttctgccgtttgccctgcaggatatgcaggtgttttctgcgtgccgtgagacgatgtgggcggtgctttcctcagcggacggcgcctatcatattgaactgtgtgatgaaaacggcgcggtatgtgtccgattgacggggctcaccgcccgttttctggaagaggaaacggaggaaaaaccgctcttgcttcagccaaagtggcaggaatcaccgccggrtgaaggcggcggacaagaagagtctttcagatacgtgacgctgtatggcggaatgaacgctgaggacataagcggcgccgtatgtgcggctgackgcgaaggtccgattgaagaccgttatgacgcctgcgcggcggagctgtcagcgatcgtcacgcgtcttatcaaagaaaaacagaagaaaaaaacgctgatccagcttcttgtccccgacaggggggaagacaatgtattggcggggctggccgcttttctgaaaacggctcaccttgaacatccgaagctgtacggccaagtcatccaagccgatccgggcgagtcagcctcggcgcttcttgccaagctgaaagaaaaccgggcgcatcctgaacaagcggaaatccgttatgaagccggcaaacgtctcgtcagaaactggcgtcacctgcctgcccctcaaagcggcgccgttccgtggaaagacgaaggggtttacctcctcactgggggagcgggcggcatcggcctgattttcgctgaagaaatagcctcccgcgtcaaaaatgccgttctcatattaacggggagggcggaagcgcttgatgaagagcgctccgcccgcttacggcgcttggaagcgtcgggtgcccgcgtattgtatcaatcggttgacgtgacaggcagggcggcggtcatcgccctcgtccgcggcatacaggaggagcacggaacactcgacgggatcattcacggcgcaggcgtgatcgctgacaactacattctgaaccagacagaaaacgaacggaagaccgtcatggmgccgaaggtgaaagggcttatcaatcttgatgaagcagcgaaagatgtgcggctggactttttcatyctgttttcttccttggcgggaggtatgggaaatccggggcaggccggttatgcggcagccaacgcatttatggatgtttatgcagcccgccggaaccgtctcgtgcgggacaacaagcggagcgggcagacyctgtcygtcaactggccgctttgggaagaaggcggtatgcgcgtggacaaagagaccgaacggctgatgtatgaacagaccggaatgaaagccatgcgatcggcctcaggcatccaagcgctgtacgccgcttttgcctccggagaacaccaggtcatggtggcagaaggcgacgaaaaacggattcgaaaaaacctgatgcctgaaacgccggaaccgtcccgtagcattcatgtgtcaaggaagacgcccgtccatatgccgaataaagtacaagcggaactcaaacatatgatatcaggcattctgaaggtgaaagaagacgagatagatgctgaatcagagatgagagattatggctttgattcggtttcattcacgcagtttgcaaatgaactaaataaaatgtatgggcttgaactgacaccggccgtgttttttgaatacccgacagtctttcgttttgcccaatacttgctgacggaacatccggatacattcggctcacaggcagaaacagaaacggagaaaccggttgtgcgtaaaaaaatgaagacggagccattcttgattccgtcccgccttcctaaaacaaaaaccgcagctgcacctgagcccgtggcgataatcggaatcagctgtgcatttccaatggctgaaaatccggaaatgttttgggagaatttagccggagaaaaggactgcatttctgaaataccgccggagcgctgggactggagacagtattacggagatccgcagaaagataaaaatgcgagcaatgtaaagtggggcggcttcattgatgaaaccgctcaatttgaccctttatttttcggtatttctccgcatgaagccgaaatgatggatcctcagcagagacttttaatgatgcatgtatggaaagcgattgaagatgccgggtgctctgccaaaagcctgtcaggtacaaatacaggcatttttgcaggcacgacaaacagcggttacgcccaggaagcttcaaagttccatatagagattgagggttcttccgccgccgggacggttccgtcaatcggtccgaaccgtatgagctattttctgaatatacatgggccgagcgaaccgattgaaaccgcctgttcaagctcattggtcgctgttcaccgtgcggtcagggcaattcaggccggagactgcggcatcgcgattgcaggaggcgtcaatgctattgtatcgccggatatgcatatcagctttaataaagcgggaatgctcagtgaagacgggcgatgcaaaacattttccgatcaagcggacgggtatgtcagagctgaaggtgcgggcatgattgttttgaaaacattatccgatgcggaacgtgacggcgaccgtatttatgctgttattcgcggaacggcggaaaatcatggcggacgggcggcttcccttacatcgccgaatccgaaagcacagacagaagtcatgataaaagcgtatcagcaagcgaacatcgacccccgtacagtgagttatattgaagcccacggcacgggaacggcgctcggagatccgatagaaatcaacggactcaaagcggcttttgcagcgctttatcagaaagccgaagtaacggcacccgatcagcctcattgcgccatcggttccgtcaaaacgaatatcggccacacagagcttgccgccggcatggccgggcttttaaaaattattttgcagatgcagcacaaaacgctcgtgaaaagtctgcattgtgaaaccgttaatccgtatatcagcctcgacggcagcccgttttatttcgtccgcgacactcagccgtggaaagcggcgactgatgatagcggaaatgaactgccgcggagagcgggtgtcagctcgttcggatttggcggtgtcaatgctcatgtcgtgctcgaagaatatgtttctcctgttgaagagaaacaatggacggccggtgaacttcagccgtccttattcattctctcggcaaagacggcggaacagctgaaggaacgtgcggaacagctgtgcagatatttggaaaagacacattcagctgacggagctcttgcgggtatcgcttatacgcttcagcttggccgggatgaaatggaagagcgccttgccgttattgctgaaacaaaagaagagcttacgaacgcgctgaatgatttcctcagcggcaaggagacggggcagaatttctttacaggccggaacaaagcgatgaaacagctgtttacagagatgacagacaacgcagaaatgagcgggaccgtagatcaatggattgaagcaggaaagtatgcaatgcttgcaaaattatgggtgcaaggtttacatgtcgactggaataaattatatccggacgaaaggccaaaaaaagtcagcctgcctgtctatccttttgcgaaaacacattgctggataccgcacagtgcgcagcatataaggcaccgggagacttatgagactgatacgtccccgcttgagacttatgagcgcctgcttgatgatttggagaaaaacgaaataagcatagaaaccgctgtaaaaagaacgatcggtttttacagggattagcgtaatggaggaaaccatatgaaagagtttctgcaccgggttttttctgacgtcaaaaataaaaaaatgacaaaacaggatgcgatcggcattttgcgcgattatgatatgcggatgggacttcgccaagcggattaccttcatccgcttgctcagcagcatatttccgatgaaacgggacagggattctcggcagctttcagcggccgggaattttttctcgctgatgtttctttacagcgtaaaaagcttatgcccggagaacttcttttggaaatggcgagagctgccgctgttttgacagtaaaggagactgaggctgtccggctgacgcatatcgtgtggtcaaagcccattctgactgaggctgagccgttccatatcgaaatcaggctgatacccgcagagggtgaagccaaaaggtttgagatttataatccattttctgccgatttcagtcatcatgatgtgtacagccaagggatgattcagccagttgatactgcgcccggcatgctggatatcagccgcttgaaggaaaacggcggcttcctgatggatcagcagcaaattgaagccatcactcagaacgataccgttcagtacagtgagcacatgaaaggaattgagcgtatttacgcctcagcaggacggatgctggcagacatatcaattccattgacaaaccaaaaagaatgcgcccgattcggcctccctccctgtgtgatgcaaagtgtgacagaggcatgcgcgctgcttggcggcaaagaatataaaacgctcgccccggtttcattggacgagcttttgttttatgaatcttgtcctgacaaggtatgggccgagatacaagagaaggcggggagcttttatattgatttatgtgacgaagaagggaaaatatgggcttccctgtcggggttgaagctgcagcctgtcatcaagacgggcgctcccggaaaaaccaatgccgaacaccgcagtgaacgtttgtatgaacaaacgcttcttcagctcaaaacgctttttgccctgactgcaaaaattgctgtttccaacatagatactgaagagccgctggaaacctacggaatcgactcagtcactgtgacgaaattgaaccgcgaattgtctctgcttttcggtgacctttccaaaacggttttttacgaatataagacactgggctccctggcagctcactttgtcacggattatccgaatgaatgccgaaaatggacaaatgatgatgagcaccgttcaggcatatcagaacaggttttggcaaatgaagattttccggtgcttccgtcgcttatcaagcgaaagaaacggccttctttttccaatgagaaccagacaaaagaagggattgcgattatcggagtcagcggacgttatccgcaagctgaaacacttgaagagtactggaataacttagcggccggaaaagactgtgtgacggaaattcccgaagagcgctgggaaaaggacaagtactacaaccctgatcccgaagcggccgtgaaagaagggaaaagttacagtaagcggggcgggtttctgaaagatgccgctttctttgatccgctgttttttcaaatttcaccccgtgatgctttgaatatggacccgcaggagcgtctctttattgaaatgtgctggcaggtgctggaggatgccggttatacgaaggaacagcttgagaacctgtataacggccgggtcggcgtttttgcgggcattacgaaaaacgggtacggaatgtactggaaaaacggcggcaccctgcagccgaaaacgtcgttcagttcagcggccaacagagtttcctattttcttaatctgaaagggccgagcatgccggtcgacacgatgtgctcgtcttcgctgactgcaatccatgaagcgtgtgaaaacatccttcgcggcgaatgcgacatggcgattgccggcggtgtgaatgtgtatacgcatccttcggcttatgcggagctcagcgcctatcgaatgctttcaaaagacggaacgtgcaaaagtttcggtgaaggcggggacggatttgttcccggtgaaggcgtcggggccgtgctgttaaagccgctgtcaaaagcgatagctgataaggaccatatttacggggtgattcgcggcactcatatcaatcacggcggcagaacaaacgggtatacagtgccgagtccgagcgcccaggctgacgtgatttccggcgcgcttaaaaaatcaggaatacatccgcggatgatcagctgtatcgaagcccacggcacgggtactgaactcggagatccgatcgagattgacggtttgacccgcgcatttcaaacgaaaacgtcagataaaggcttttgcgccatcagctcagttaaatccaatatcgggcatttggaagccgcggcaggcattgccggtgtaacgaaactgctgctccagtttcaaaaacgaaagctggccccttcattacattgccgaaaattgaatccgaatattgcattcgaccggacgccgtttgtggtgcagcatgaattggcagactggaaacggccggtcattgaggaaagcggagcgcaaaaagagattccgagaatcgcgggaatctcttcttttggcgcgggcggggcaaatgcccacatattgatagaagaatatattgaacctgatagggagatttatgagccattcacagatgaagatcccgcagtcattttattatccgccaaacaggaggccagcctgaagcagcgggcgcagcagcttcttcaagcgatcagaaaaaatgacgtcacagaccgcagcctccgggatgcggcttacacccttcaaaccggaagagaagcgatggaagaacgtgcggcgtttatcgtgacgtcgacagagcagttagcggaaaaactgcagcgttttattgacggcgggagagacggctgcttcaggggaaaaagcaaacagtataaagacattctagccgtttttaaggatgaagatatgcaggaagccgtccgtaaatggatgaaaagaaaaaaattcgcgaagcttctggaactttgggtaaaagggctgaagattgattggtcagagctttataacggcagcctgccgcatcgcatcagccttccaggttatccatttataaaggatcggtattggccggacgatgcagcgccggacaatgttcgtgatgctgaaacacattctgaaacatttcgtgaaatccgctttttacagaaaagctgggcagaaagcagcagtgttccggctaaggaagtgcggggcgtcatcggaatagctgctgatcaccagacaggaaatttagccgttgagctgtcccgttatttccccgagtctgaaatcattgacgctgcatcaccggaaatatccggggacgcggcccggtttggcggtctgattgatgtgaccggatgcgggaaggaaatcaatcatgatgacggctggattcatcgtctgcagtctctcattgacaacagaaaccgcggccgaaagcttcagctgctttgtgtgacaaaggggcttgaaccctttgcaaatgaaacgataaatctctcaggtgcaaaaaaggccggattgtaccggatgctccaaagtgagtataaggatatccgctcgcggcatatggatgcagaacggactgccgaagatcctgagctggcaaaccagatcgcagaggagttttttcgcgattctgaagacatcgaagtgtgttaccgaaacggtgtgcgttatcacgcgcggttaaaggaaacaaacagcttagctgaaaaagaattttcatttccgaaagaccatgtgctctggatcaccggaggaacccggggactcggatatttattcgcccggcattttgccgaacgatacggagtcacgaaactcgtgcttaccggaaaagaaacaatgcctccgaaagcggagtgggatgatcatatcaaacggaattccccgttttccgataaagtgagaagaatcagagagctcgaacaaaaaggtgtccgaacggaagtgctgtctgtatcttccggccctgaatatgagcaggctgtcagccgggtgaaagagaagatgggcccgattggaggcgtgatacacgcagcgggagccgtagatctcgatcatccggcctttatccgcaaaacgagagaacagatgatgaccgtgcttgaacctaaaacagacggactggaccttttgtatcaagcgctgcacaaggagcctctccggttttttgcgctgttttcttcagtgtccggcgtgatgccggaattaggagcgggacaaagcgattatgccatggctaacgcctatatggattattttgcggccgcaaaaggttttccggtgctgagcatccagtggccgagctggaaagaaacgggtatgggcgaatcaaaaagccgggcctatcagaaaagcggtttaaagagcatcactgacagagaagggctgagcctgtttgatgccatcatggcaggcgattgcggatctgttattatgccggccgtcattcacccggaaaaatgggagcctgaccgtctgctgctttcatccggccttactgaaataaagcagcaggaacaggccgatacagaaagcgttgaggagtggctgacgggcatttgctgccgggaattaagactggagccgtcaagatttgaatctgatacaccgtttcaagattacggagccgattccattatgcttgcccaagtgtccagagcgatcggaaagaggatcaaagctgaccttgacccggcggtgctgtatgaatatcctacggttgctgcgctggcgggatggcttgaaacagcatatcccgaaatcaaagatgccgtttcaaaaccggttcagcctgtaattccggacgttcccaaacaaacagcagccgttgtcattcagccctctggagctgcagcggcgcaagacatcgctgtggtcggaatgtcctgccgttttccgggagctgaatcaattgaagcttattggaagctgctgtctgaaggaacgtcggctattcaaagggtgccgaaagaacgctggaaaacggagaaggcggattatgcgggccttttacaaaatgtaacgcattttgacccggattttttccttattccggaagaagacatcaatgcaatggatatccagtcctttcttatattagaagaggcgcttcatctgttcagagacagcggttactcgttacaagaaatgaaaggcaggtcagccggtgtctatttaggaggacgcggcggcagtatgcctgatgaaaaccgtctgaagcatgcaaaaaatccgatagtcgcagccggtccgaattacttagcggccaatctttctcagttttttgatttgaaggggccgagtctcgttttggatacggcctgttcttcagcgcttgtcgggatgaatatggcgatacaggcgctctcttgtggtgaaatcgactcagcggtggtcgggggagtcagtctgctggaatccggtcaaacccaccgaatgttcgaacttcgcaaactgctaagcgaagagcctgcgtttcatatttttgaccgccgcaccggcggcatcgtattgggagaaggcgtcggaatggtgtatttaaaaacagctgcccaggctgtaaaagacggtgaccggattcatgcggtcattaaaggcatttccgtaaacaatgacggcagaaccgcggggcctgccacaccgaatatacaggcgcaaaaagaagtgatggccaaggcgcttgccaaaagcggcagaaaagcggaggatatcagctacattgaagcaaacggttcaggctctgaagtaaccgaccttttggaactgagggcgattgaaacggtgtaccgtatgcaaaacagcgcgccttgcgaattggggtcgatgaagccgaatatcggacacccgttatgcgctgaagggattgccggattcattaaaacagtgcttatgctctcgcgccgaatgcgtgtgcctttcctttcgggcaaagagccgatgacgcattacgatctgtccgcctcgccgttttatttttcgcacgttctgcgtgaatggacggattcaccgcggattgccgccgtcagcagcttcgctgacggagggacgaatgcccatgtcatagtggaagcttgggagcaagaggcgtataccccggttagaaagcctttgccgagacaggaattaaaacgccggccaattcgttcggacaaagccgaaagcctgcatgaaaacacacataagtcccgtccgaatacgttttggaaacaaatgaagacttactgattgcgctgaaaattgaacgtcgatatggaggaagttcatatgcaagagcagcttcttattaacaatcagcatcccgttctgaaacatcataaagcctatggaaaggaactgctgccgggtctggcttatattgacctgatctatcagactttcagagaaaacggtttttttcatgccggccttgaactcaggcacttatcgatttttcaccctttagctcctgaacagggagaaacaatcctgctttccgttgactgtacagagaacggcgaagggcagtggaaggtagaggtgaatgggcaaaaacaaggtgacgaagcagcagagacaaagatatatgccgcggcgcaaatgcattccgtcaagcccgccggcttccaagagagcgtccggatggatgccgtaaaacaaacggcggcagaaataccgcttgaggacatttacgcggaatgcagggatcaagaactggttcattcaggaatgatgaaaggctgcggaagcgtctaccaaaatgaaaaagagatttatattgatctgtcggtgcaaaaggatcacctggaacatgcagaagaggcgatttttcatcccgcattgatagatgcgagcagcatcggctccaatgtatatctcgctcctttgacgagggaggaggggcaattatttctgccgctgttttatgaatcgttttattgcaccgaattgctgcagacaacatgtatcaccaagataaaaaaagaatccgtcacccgtaagaaagatctcgtttacgtgacaatggagtttttcaatgaggaaggcagaaaagtcggcgaactgaaaaacttcgccaataaactggtgagggacccggaactgatcaatcagaaacggcaaaagaaagaacctgacgggcggaatgccgtcccggctccgcaagcggaaccggcgccttctgagccccgccgtacggaggcttccgccggccttactgaacagtgcatcctttatttaaaagaattgcttgccgcccgattgaacaaacctgtgaaagagattgacccggatatcggctactatgaaatggggctggattctccggggctgttggacatggtaaaggaaattgaacgaaaaatcggaacgcagcttctgccgacactgttatttgaatacacgacaatcgcggaattggcgggatatttgtgcgaacattacggagccggtttcggccatgctcaaagcgggcattcaagtgctgagcctttgcaccgggaaaaaaagaggacgacccaaatccgcgtgaaaaaatcggcgtcagccggaacgcagaatggagatattgcgatcgtcgggatggcgggacggtaccccggcgccaaaaatcttcgtgaattttgggcaaatttaaaaaatggagaaaacagcgtaacggaagtgccccgttcccgctgggatacgaggacatatgagcatttgcggtcgccgtccggcaagccgatttccaaatggggcggttttatagacgatccggattgttttgatgcgaaattttttcggatttctccgcgggaggcagaagctaaagatccgcaagaacgattgtttttagaaacatgctgggaaacgattgaggatgcgggctacaccccggaaacaatcgttcagccgaaagggccgaataagagaatgaacgtcggtgtgtttgccggggtgatgcatatggattattctctcgccggcgctgaagctgcggctaaagggctggtctttccttatcccttgaactatgcgccgatcgcaaaccgggtttcatatttttgcaattttcacgggccgagcatggcggttgacacggtgtgttcgtcatctttgacggccgttcatatggcggcggaaagtctgagacgcggtgaatgtgaagcagctcttgccggaggcgtcaatttatcattgcacccgacaaaatatatcacatacggcttgatggatatgcattcgagtgacgggctgtgccgcacgttcggcgaaggaggcacaggctatgtctcagctgacggcatcggagccgtgctgctgaagccgctccacaaagccgaagaagataaggatcatatttatgcggtgataaaaggcagcgccgtcaatcacgtggggaccgtcagcgggattaccgtgccgagccccgtggcgcagggggatatgatagctgaatgtcttgaaaagacggggatcgatccccggacgatttcttatgtggaagcgcacggaaccggaacttctttaggagatccgattgaaatacaaggtcttgttaaagcttaccgcacgtttacggaggatcggcaattttgtgcgatcggttccgttaaatcgaatatcggacatgcggaatcagctgccgggatcagcgggcttcataaaacggttttgcagctgtttcacaaaacgcttgtcccttctttacactcagagacgattaatccgtatctccgtttagaggactcgccattttacgtgcagcaaaaaaccgagtcatggaaaaagccggcgtatacagagaacggccgtgaacatgcctgcccgagacgcgcaggcatcagttcattcggggcgacgggttcaaacgttcatctcattttagaagagtacaggcctaaaaaccccggtattacggaggatcaagagagaccgtatatcgtgcctctgtcagcgaaaaatccggagcggctgaaggaatacgctacccgcctgctgatgtttctcaaagataaagcgcttgaaggaagcggtccgcttcatgacaaaatagatacaatgcaaaatcagctggaaaatgcgttgcgaggtgttctggccgaagttctgcatgttgcggccggctcggtagatgatgaacaggattggaaggaattcggcttggatgtcatgcagctgacacagttttctgagctgatgacggatcaatacgggctggcaatagacatgactgatctcatacagcatacttctgtccggactttagcagaatgtcttacaaacgatgagaaacataagaatattctttccggtcttttcggtcagtccggcttagataagcagcctgatgaatctttttccctgcggtcactggcgtatacgctgcaaacgggacggctggcaatggaagagcggcttgtttttttagtgaacgatcaagcagacctgatcaggaaattaactgaatttacagaacaaaaacggcagattgacggctgctttcaagggcggtctgacagcggaacggaaatcaggggtttcctgaacgatgatcaggatacggaggagctgatccgaaaatggatggacagcggcacttacaaaaaacttgcggagctgtggtcaaaaggatttgagatagactggacgcggctgtatcgggaggagaaaccgcgcaggatgagtctgccgacgtatccgtttgcaaaggaacgatattggataccggagcccgatcatcccgtcacttccgtaaatacagaaagcaggcttcacccgctgcttcaccgcaatacatcagatttgctagaacaaaaattcagtacgatactgaacggagatgaattcttcttagccgatcatatcgtccgaaacaagcgtgttctccccggggcggcttatcttgaaatggcgagagccgcggctgaactggctgccgcgccgttagccgctgaatacacggctaaaaccggcatttcgctgcggtatatcagctggatacgccaggccgttcacaaaaaagagacgctgcgtatgacgacagggctttctttggaggataacggcaatgtttcatttcaagtgtacagcagtgaaaatgattcagacatttattgtgaaggcagtgctgtgattgagccgctgtctgaggcgccggttttgcatattgaacagctgaaagcgcgatgccgcaaaaaagtgctgtcaaaagaagactgctacgtggcgtttgcaaaggcggaaattgtatacggaccttcacatcaaggaattgatcatatttattgcggggaaaaagaagccttggctaaattggtgctccctgcttccgtttctgatgaggccgaacagtttatgctccatccgagcctgattgattccgcttttcaggcggccatcggcgttatgaatgaagatcaagcgggttatccggagcagccgttaatgccttttgaattgcatgaactgaccgtttttcatccgtgcagtccgaacatgtgggctgccgtgtttgtgacgcatgacacaccggctgtgcgaagaatggacattgatatatgtgatgaacgcggcaatgtgtgtgtaaggataaaaggattttctgcccggatggccgaaagtgcgccggccgtaaccgataataagcaatacgatctgccgggtaaccttaccggagccgtcaaactgatgcaggtatgggacgcggaaccgatagacaaccaaacccgcttccccatttctgaagcaaaagctgtcatcataggcggtacagacgggcaggcggacgcggttttacgattgtttcctaaagctgtgcgatttgatatcggccaaagtgcttccgttgaagtgatatctgatcggctccgccgtctcggtgagattcagcatatgatctggtttgcccctcagccggctgattctgacagccatgatcaaaaaagcggggtgctgcaaattttcagagcggccaaagctcttatcggtctcgggtatggaaaagagcagctcgggatgacggtgattacgcaccaagcacagcctattacccaatatgatgaggtgcgtcccgctcattccagtgtgcacggtttcgtcgggtctctcgctaaagaacatccgagctggcacatccgtctggccgatcttgaagacgggggggattttcccgcagaagacatattcagcctgccccgcgaccgtacgggtaaagcatgggtgcgcagacatcaggaatggtaccggcctcaattgcttccggtccaaagcgggccgtctgaaagtgttccttaccgctatggaggcgtatatgtcatcatcggcggtgcgggaggcatcggcgaggtttggacagattatatggtgacgacgtataaagcccgagtcgtctggatcgggaggcggccgctggacagccggatacgccaaaaaatagaccggtaccggccatcaggcccggctcccgaatatatagccgcagatgcttctgatcttccatcgcttcagcgcgcctatgaacagattaaaaacacatacggcaccatcagcggcgtcgttcattcagcgatggtatttgcgaatgaaagcgtaaaagatatggaagaatcacagtttcacgccagccttgcggcgaaagtggatatttccgtcaacattgccgaagtatttgcgaaagagtctttggactttattctctttttctcttcggttatttcatatattaagaatccgaatcaaagccattatgcggcgggatgcgcatttaaagacgcatttgcccatgagctttccggacggctgtcatgccgggtcaaagtgatgaactggggttattgggagcgggctgacaatcacatttctgaagagtttgacagactgagtgcaatcggtctcgggctgatcagccgggcggaagggatgcaggcgctggaaactctgctgacgcagccgatctcccgcatggggctgatgaagctgaccaagccgattccgatcgagggaatgaaccctcatgaatttgtgactatctgattgcctgtcaaattgacggagcaaatttaattttcttaggaggataaggttttgggtaagggagacaaacaaaaagaccgtacacagttatccttaagaacagaaataagcaatcaaatgaaagaattgaatcggcttttgctgcaagtgctgcgggtgacgctgcgttcaatgggtctgaccggcgaagcgccggcagcttcctgtctgcctttatatgaacgctggctggaagaaagcatccgtcttttagacagcgattttaaaagcggtgaaacggccgcggtttggaaagagtggcataagaagaaaaacgaatggctgaaagatccggatatgaaagcgcaggttctgctggcggataccgtcattcaagctttgcctgacattttaacaggcaaaataaaagccactgacgtgatgtttcccgattcttcaatggagcttgttgaaggaatctataagcataacattctcgctgattattacaacgatgtgctggcaaatgaagcgtgtatgtatgtggaaaatgtaatgaaaaacaatcctgatgcaaacatccgtctgctggagatcggagcgggcaccggcggaacgagcagcacattgtttaaaaagctccgcccctatcaaaaccatattcaggaatactgttataccgacttgtcaaaagcttttttaatgcatgccgaaaaggaatacggcgcggacaatccgtatttgacgtatcagctgtttaatgtggagcagcctgcggcgggccagggattacatctgagaacctacgatatcgctattgccgcaaacgtgctgcatgccaccaaaaatatccggaaaaccttacggacggcaaaagccgtattgaaaaaggacggtttgctgctcgttaatgaactgggcgggcatacgccgtttacacatgttacattcggcttattagagggctggtggctgtacgaagacgaggcgctgcggattccggggtgccccggtctttatccggaaacatggaaatccgttttaatggctgaaggttttcattccattcaatttccggctgaaaacgaacgtctgcacacccagcagattatcacggcgaaaagcaacggagtcatcaggcagagcagggaagcttacaccgcgcaaaagcgccaatcaaacgtaccgcaaacatcctctgatcgtcagctccccatcaaacaagcgggagaggggctttcggaaaagacagcggcttttctgataaaggctgcggcaaaagtattaaaaatgccggcagaagagataaatccgctggctcctctggatgaatacggcattgactctattctgatcgttcagctgacgaatgagctgcgggatctcgtccctgatatcagcagcacgctgttttttgaataccggacgataggagagcttgccgcattcttggctgaaacgaaggagcgcgaactgcatgcgcaattttctgaagaagtccctcatactgaagcggcatcatccggctctttgcttgaaaaaagcacagagtacctgaaacagatcgtcagcgccatcttaaagatgccgattgaggacgttcaagcccatacgccccttgaagaatacggaatcgattccatcttaatcgtacagctgaccaaccgcgtgcgggaagacgtccctgatatcagcagcactttgttcttcgagtatccgacaatcggcggattagcggactatctcgtcagctcaagacaggaagatatggctgggattttcaagacaaataaagaagccgaaaaggcgccgcacactttacagaaaaagcaaagccgtaaaaaaagcgccggattgacgaagcgccaagcggcatctttttctgaaaaagcgccgcccgcttccgaaccgccgtcaaaacactttgaagtggcaattgtcggtcttgccggacggtatcccggagctgaaaatgttaatgagttctgggaacggttaaagaccggtgaacacggaatcaccgaaattccgaaagaccgctgggattggcgggactactatgatgagacaaaaggtaaggaaggccggatgtatacaaagtggggcggctttttaacagatattgataaatttgatacgctgttttttaaaatctccccgaaagaagcggagcgcatggacccgcaggagagactgtttctggaaaccgcttatgcggccctggaggatgccggatatacccctgattcactatgcgccggtaaaaaggttggtgtctttgcgggtgttatgaacggcaactatccgacaggggcccactaccactttatcccgaaccgcgtatcctatgtgtttgattttcacggtccgagcatcgcggtcgataccgcatgctcctcatccttaaccgccattcatctcgccgcagaaagcatcagaacaggtgcatctgaatgcgcgattgccggcggcgtaaacctgattacagatccggttcattatatcggactttcttctatgagaatgctgtcaccgtcaaacgcgtgcaaagcgttcggtgataaggctgacgggtttgttgacggagagggcgtcggctgtatcgtgttaaagccgttgaaaaaggctgttgaagatcatgatcatatatacggtgtcattaaaggaagcgctctgaacgccggcggcaaaacgaacgggttcaccgttccgaatccgaaagcacaaggagaagtgatcgcagacgcgatggagcgggcagggattgacccgagagcaatcagctatctggaagcccacggcaccggcacttccttgggagatccgattgaaatcgcagggttaaccaaggctttccgccgctatacggatgcaaagcaattttgttccatcggttctgttaaatccaatatcggacacctggaaagtgcggcgggcattgctgcggtcaccaaaattcttcttcagatgaaacacggatatctggtgccgtcgctgcattcaaagcagctgaacccggaaattgattttgaaacttctccttttatcgtgcagcaggaaacagcggaatggagacggccggtcatagaatctgaaggagtaacacgggaatatccgagaatcgcgggtacatcttctttcggagcgggcggtgcaaatgcccacctgctgatagaagagtatgaaccggctgaaatgacttcagcagactccggccgtccggcgctttttgttttatcggcaaaagataaagaccgcttgcgcgagcgggctctgttgctgtcggatgccgccggaaacggaacaattacagatgcgaatctgcttgacgcggcatttacccttcaagtcggcagggtcccgatggaagaacggctggcgatgacagcggactctgtttctgaattggaacagaagctgactgcttttctgaataattccggttccgtaagcggggtgtttacgggccggagtgatagtgctgtcacggagacggaaggcactatcagtgagtggatggaaaaacgtcaatttgacagtcttttgaatgcctgggttcacgggacgcccgtcgattgggcatctttatataaaggcgcgctgccgcatcgtatcagtctgccgtcttatccatttgcaaaagaaagctactggatgaagcgggaagaaccaaaaacaggaacaactgaatatgtgcatcctttcctgcatgaaaatacgtcaaccttggcggagcaaagctatcatacatcttttacaggccgggaacacgttttccaggatgtgagcggggagcgggttttgtcggcagccgtttatttagaaatggcgcttgcggcttttcatcatgcggcagacagctctgaagaaaaagagatatggatccgaacggcggcatggactgacccgattaccggcggacatcacggtgcgggcgtcaatctctcccttctgtctgaagacgaggaaggcatccattatgaaatatacagtgacgaagagaagctgcatcattatggaatcatcggacaagggaacatacagccatcccgcgtgcttgatattgcctccttacaaaaagactgccgcccgctgtcattcgattatgaaacaccaggcacatcaggtgtaacgatcagtaaggagttccgcaccgttgaaaagctttatgcgggagaaagtgcggtttgggcgaagcttgctctcacagatgaaagcggccgtaatccgggatatcatctgccgccggaatttctggacgcagcttttcatgtcctggcaaaaacggagccgtcagtccatatcgtgcctgaagcggttgaagaactgcgcgtcatgcgtccgtgctcatccggcatgtggatgtatatgaataaaaagaatcaaaccggctgtgacattcaattttgtgacgaaaccggcactgtctgcgcagaaatcaaagggataagaatgagacagccgtctcagcaggatcacgggcaagaggaacaatccgagatgatgatatttgaagaaatgtggacgcagcagcctctgaagaaatctattcatgaagagctgaaaacggtcatctgttttcttacgggagaagctgccagaaagcatgcttatcagtctttacaaaccctttatccgggagccggcgtgttttttatttcacagggtgaggaaactcaaaagctttcaaacacgcattatcaaattaaaatcactgacggacaagcatatcaagaaacgtttcggcatattgaaacggctgcaggcaaagcggatgccgttttatatggatggccgcttgaagatgaaaaggccgtgaaagactattccattctgtatcatgtgatccgcgcagctgcttctttgcgttctaaaccgaggcggatccttctttccgctcagtgcgggagcgataccgatatcagttacgccgagtcatggatcgggctggaacggtcgctgaaactgatcttgccggagacggatacggccgcggtttattttggacaaaaaggaccgtttgaaaagctgatccataacgtatgtgaagaacttcacagcgagtcgttcggcagtgtcatgtacagtggggaaatccgccacgtcatggaaatgaagcagacggatatcgcccctgttgagaagcgtgtgataaagagcggaaaaacgtacttgattaccggcggatgcgggggattaggcttgttatttgccggatattttgctgaaaaaggaccggttacgctcattttgacggggagatcagcggcagacggcccggtgctgaacaagataaagagattggaagcatcaggcgccaaggtgttttacgtgcaggcggatgccgcagatcaggctcagatggagaaaggtttgcaagaagcgaaagagaaaggatgcgggccgattcacggtgtcattcacgctgcaggtcttcaaggcactgaaagcattctggagaaagatctgcaaacctttcagcaagtcttatcgccaaaagcggacggcaccgcggtgttagatcaggttctgtcacgggagccgcttgacttcttctgttgtttctcttcttcttcagcgattttaggagacttcggttcttgtgactacgcgatggggaaccgcttccaaatggcttttgtccgtcaccgggataaacttgtgagcctcggactcagaagcggcaagtcacttgcaatcaattggccgctttggaaagaaggggggatgcatgtcggcacggcggaaagcaccgatatgtatttaaaatcaagcggacagcgttatttatacactgaggaaggactcgaagcttttgaaacattgttagtccagccgtccagccagtatctcgtcctggccggttttccgtcgagggccaaacgcttcctgcagatagatcaaggcgaacggccgatttcgggttctgtaaacaggaacgtcccgttttcaggaaggcggagtgaaatgaaaggctttacactggaagaatgcgtaagctgggatgtgaaagaactggcggcggggcttttgaaaatagacaagaacagactgacggacgctgacaatctggctgatttcggctttgattctatcagtttggcggaattcgcctcttctttgtccgcccattacggaattgaagtgacaccggccctgtttttcggacattccacactggagaaggtcgtccgctattttctgacggaacaccagtccgtcatggagcatgtctatgaagaaaagaaacctgaatccgcagatcaatctgtctttgaaaaggcaggaacggaaaagcgaaagaagcagaggggaagaaataagctgaacgccggaaccgagggcagtcaggcagctgattccattgccattatcggcatgagcggccgatttcctcaggcgcgcacggcggacgagctgtgggacattctgtttcaggaaaaggacgttgtcgcaccggtcgcaaaaaaaggcttcacaagttcaaaatggaaactcggcgctgtaccgggggcggacgaattcgaccctttattttttgaaatatcgccgagggaagctgaaacgatggatccgaaacagcggctgcttcttcaggaagcgtggagggcccttgaggacgccggctacggcgccagtcacatcaggcagcagacgatcggtatgtttgtgggggcggaagaaggagattatcaccttttaacacgggacaaaggcaatgtcacgtctcatcataacggtattttggcggcgcggctggcttatcacttgaatttatcaggtcctgtgatggcgataaatacagcatgttcttcggggctcgtttctgtccatcaggcggtattaagcctgcagaataaagagtgcacaacagctgttgcggccggggtgaatatcatgaataccccggacttttttgaaacgatagataaagccggaatgctgtcggaaaacgggaaatgcttcgcgtttgataaaagggctgacggcatggttccgggggaagcggccgcggcggttgttctgaagccgctgagagaggcggaaaaagatggtgatccgatttacggggtgattcgggcgagcggcatcaattatgatgggaaaacaaacggaattaccgctccgagcggcgtcgcgcagacccggctgcttacttccgtttatgaccggggccgtatcaaccctgaagatatcgaatatatcgtcacacacggcacaggtacaaaactcggtgatccggtggaaattaacgcgctttatgacgcattttctgcctatacaaacgaagaagctttttgcgcgctcacatcaattaaaaccaatatcggccacacgtttgccgcatcaggcattgtcagtttaatcagtcttttacaggcgttctcccgtgagatgattcccgccagtctgcattgcagcggggaaaaccgctatatcaactgggagaagagtcctttttatgtgaataaaacgggtaaaccgtggccttctctgccgggtaaaaaccgaatgggggcagtcagcgcattcgggatgagcggaacaaacgcccatgtcgttatggaaagctataagcgcagcgcttcacctcatcgtgatgcccctgcatatttacttactttgtctgcaaaaacagaggaggcccttcaggaaaaaatcgaagatatgatcacttgggcggaaaatggcggactgaaagaaaatgatctggcccagctcagctatacgttgttaaaaggacggcatcactttaaccatcgcgccgccatcgtggtgcaagatgctgatgacgcagtgtatgtatggaagcaggcaaagcttaatgaacatcatccttatgtgttttcgggaaaagtaccgcagcactttgcagggcgtcagcatattcaggagcacataatagaagtgctcggcaagtgcagcgcctcatattctgaccatagaaaatatcaggagctgttatgcgtgctggcagatttttattgtcaaggttatgaaatcgaaggggacttgctttatggcggacctttgccgcgaatcggcaatctgccgggctacccgtttgccaggcagacgtattgggcgtccgatcgtcttcagggagagcttgaaagccggaattcagacgaacgtgaaaagcttcacccgctgctccatgcgaatacatcgaccttgaccgcccagcgctttacttctgttttttcagggcatgaaccgttttttgccgatcacatcgtcaatggaaaaccggtgcttccgggcgcggctgctttagaaatggcccgggccgccgttacgctggctgctgaagacttgcccggcgggaaaacgggtgtaaggctcaaacagatcgtttggctccgtccggtgacggcgctttctgaaggagtgacgcttcatgtaaagcttcagccggaagaaaacggagacattgcttttgaagcgtatgccgaaggagaagagccgcttgtctttttccagggaaaggccgtgctcgaagagacggagcgtgctccggtac

SEQ ID NO: 13 - DNA, 17478 bp, Bacillus subtilis
tgaggtggaagtgtggcgacacatggagctgacagatactaatcgatcgaggacttaaccaatttgaatgtatgcttactgttatctagttttgagagaacactctcaatggtttggtggcgatagcgaagaggtcacacccgttcccatgccgaacacggaagttaagctcttcagcgccgatggtagtcgggggtttccccctgtgagagtaggacgccgccaagctatattatggtaaaggcagctcatcatgagctgccttttttgtttataagtattgcttcaggaaattagaaacgtaatacggaaatttgcgttccgtgacatctaagaaccggcggatcatcacataatcatcactgacatgctgtgtcagcagttcataccaccactccgtttcatatctcgcaatcatcccgatattgtagaggaccaaataatgaataatcatttccggaagatgcaggaagtgatcacgctgagagggaatgtaatattgatttttctccaagtgaaacaataaatttggcgaagaccaaggttctctgtctatcgggtcagcctcaaaaaccaagtggttatggtctttcctcagaaaagaccactttaaatgatggctgatatattcagcaaatcgggaatcagacatattgtaatgaatcaccgcatgctcaggcactgaaataaggtcatctttgagctctactcgggtcagccaattctttttctcttggaagtaaaagacagtatgcaattcaggtatggctgtcagcaatttcttcattgtgtaccgttcttcctcaagaccagctatcccgaataagtgcttcattacatgaatacataagccattgcgctgcaccttcacttcatcatccctaaaggagtaattttgctttttgcgtttccgggcagtcacaccatgcgcgagtactgaggcgtggcttggatagcttggatctgtggtcagaaggcaggctttcagcaattgtgacatcccgtaaaacaacagaataggcttaatttctaaaggggaaaaagatgcctgtttataaaaggactcggcgtgtttgataaagaatatgaagcgctcactgttcttaaacgcatatcgttttggttcttccatgccgctttctgtatagactttgtttagaaatttctgggaagattctacggaataaaataatgataactctttccactcatgatctctcatatgtatttttaaaccctttcctttatctaaatatttcaactctttttcgcttccttgacatgctgttttctagttgataatctacatataatattttgccgaaaagagggggatttactaatgtgggaaagtaaattttcaaaagaaggcttaacgttcgatgatgtactgctcgtaccggctcaatcagacgtacttccgcgtgatgtggatttatctgttgaactgacaaagacgttaaagcttaacattcctgtcatcagtgcgggaatggatacagtaacagaatcagctatggcgattgcgatggccagacagggcggcttgggcattatccataaaaacatgtccatcgaacagcaggctgaacatgttgacaaagtcaaacgttctgaacggggcgttattacaaatcccttctttttaacacctgatcatcaagtattcgatgcggagcatttgatggggaaatacagaatttccggtgttccgatcgtagataataaagacgatcaaaagcttgtcggtatcattacaaaccgtgaccttcgctttatctctgattattcaatgaaaatcagtgatgtcatgacaaaagaagagctggttacggctcctgtgggaaccacattagacgaagcagaaaaaatcttacagaaacataaaattgaaaaacttccgttagtggatgaccaaaacaaattaaaaggtcttatcacgatcaaagatattgaaaaggttatcgaattcccgaattcatctaaagatgaacacggacgccttattgtcggcgctgcggtaggcgtgacaggcgatacaatgacacgcgtcagcaagcttgttgaagcgaatgtcgacgttatcgtggttgatacggctcacggacattccagaggcgtactgaacacagtcgcgaaaatccgtgaaacatatcctgaactgaacattatcgcaggaaatgttgcaacggctgaagcgacaaaagctctgattgaagccggagcaaatattgtcaaagtgggaatcggacctggttctatctgtacgacacgcgtcgttgcaggtgtaggcgtaccgcagatcactgccatttatgattgtgccactgaagcgagaaaacacggcgcgacaattatcgcagacggcggtattaaattctccggagatattacgaaagcgttggcttcaggcggacatgccgtaatgctcggaagcctgcttgccggtacttcagaaagcccgggagagactgaaatctatcaaggcagaagatttaaagtgtatcgcggtatgggttctgtcgctgccatggaaaaaggcagtaaagaccgatatttccaagaagaaaataagaaattcgtccctgaaggtatcgaaggacggactccgtacaaaggtcctgtagaagaaacagtgtatcagcttgtcggcggtcttcgttcaggtatgggatattgcggttcaaaagacttgcgcgctttaagagaagaggctcaattcatccgtatgacaggtgccggacttcgcgaaagtcatccgcatgatgtccaaattacgaaagaatcaccaaactatacaatctcataattgttacaaataaaaaacatttgacagggtcgctgactctgtctattttttttatatcgagtgtgataaaatttatactgttgtgttttgaatttgaatatgtccttaacggcttaattatagatttaaaatgaatgacggaggtcgtaagattgaacatcacgaaatggaaacagctgttggtgtcattagtggtactggcactggccgcaacttgctttgttccaatgtctaaagcggaggcagccggcaatgatccgattgatgtcaacgcatcagctgcgataatgattgaggctacatcgggaaaaattttatacagtaaaaatgcagacaaaagactgccgattgccagcatgacaaaaatgatgactgaatatctgcttctggaagccattaaagaaggaaaagtgaaatgggatcaaacgtatactcctgatgattatgtctatgaaatttctcaagacaacagtttatcaaacgtcccccttcgaaaagacggcaaatacacggttaaagaactgtatcaggctatggcgatttactctgccaatggagccgcgattgcagttgccgaaattcttgccggaactgaaacgaaatttgtcgctgaaatgaatgcgaaagccaaagaattaggcatgacaaactatgactttaaaaatgccacagggcttgtgaatgaagaccttcacggcaagcagccgcaaggagaaggcgttaaagaagaaagtgaagtttctgctaaagacatggcgcttcttgcagaccgcctgatcactgattatccggaagttctcaaaacaacaagcatcgctaaaacgaaattcagagccggcactgatgatgaaatggacatgccgaactggaacttcatgttaaaaggtcttgtttctgaataccctggcgttgacggcttaaaaacgggttctactgattctgcgggatcttgttttacaagcacagcacagcggaacggaatgcgggtcatcaccgttgtattaaacgcaaaaggcaacctgcataccggacgttttgatgaaacgaaaaaaatgctcgattacgcatttaacggcaatttctcaatgaaagatctttaccctgaaggctctcaagtaaaagggcacaaaacgattgacgttgaaaaagggaaagacaagcaagtcgatattgttactgacaaggcgctttctattcctgtgaaaagcggggatgaaaagaactataaagccgaagtgactttagataaaaaagaaatcacggctcctgtgaaaaagggaacgaaagtcggaacgctgacagttacatacaaaggcagtgacaaagactatggcttcctcaaatccaaagagttcagcgtgaatcttgtaacgaaaaatgatgtagataaagcaaactggtttgttcagatgatgcgcggcatcggcggattcttctccggtatctggaacagcgccgttgacacggtaacaggctggttttaagaaataagaaagagctctgatgaaagttagggctcttttgcttaatatactgaaaaaaccaaattattagtaaaaaaatgatatctatcttattcatctcgctataaaataagaatacccatatgaaatattgtatttctgggatacaataagagatagaaattatctaactatacattgactagggggaccaaataatggctcaaacaggtactgatcgtgtaaaacgcggcatggcggaaatgcaaaaaggcggcgtcatcatggacgttgtaaatgctgaacaagcgaagattgcggaagaggcgggagctgttgccgtaatggcgttagaacgcgttccggctgatattcgcgctgccggcggtgttgcccgcatggctgatccgacaatcgttgaagaagtaatgaatgctgtatccattcccgtaatggcaaaagcgcgtatcggacatatcgttgaagcgcgtgtccttgaagcaatgggagtagattacatcgatgaaagtgaagttctgactccggctgacgaagaatttcatttaaataaaaacgaatatacagtcccgttcgtatgcggctgccgtgatctcggcgaagcaacgcgccgtatcgctgaaggagcttccatgcttcgtacaaaaggcgaaccgggaacaggaaacattgtggaagctgtccgccatatgagaaaagtaaacgcgcaagtgcgcaaagttgttgcgatgagcgatgatgagctgatgactgaagctaaaaacctcggcgctccttatgaactgcttcttcaaatcaagcgtgacggcaaactgcctgtagtgaactttgctgccggcggagtagcgacgcctgctgacgcggcattgatgatgcagcttggcgctgacggcgtatttgtcggttcaggtattttcaaatcagacaaccctgctaaattcgccaaagcaattgttgaagcaacgactcattacacagactacaaactgatcgctgagctttctaaagaattaggcacagcgatgaaaggaatcgaaatctcaaatctattgccggaacagcgtatgcaagaacgcggctggtaaaaccataggagagctggaagcatgttaacaattggtgtacttggacttcaaggagcagtaagagaacatattcgttcaattgaagcatgtggttcaaaaggtgtcgtcattaagcgtcctgaacagctgaatgacatcgacggcttaatcctgccgggcggggaaagcacgacgatgcggcgtttaatggatacgtatcattttatggagccgcttcgcgagtttgccgcccaaggcaagccgatgttcggcacatgcgccggtctgattattttagccaaagagatagcgggaacggataacgctcatttagggctgttaaacgttgtcgtcgagcgtaactcctttggccgtcaggtcgacagctttgaagctgatctgacgattaaaggccttgatgagccttttacgggtgtatttattcgcgcgccgcatattttagaagccggagaagatgttgaagtgctttgtgagcataacggacgcatcgtggctgcaaagcaggggaatttcctcggctgctcgttccatcctgaactgacagatgatcaccgggtgacagagctgtttgtgaagatggcggaaaagcataagcaggaaacagctgtataaaacagttgaaaaccgctgatacttatagtacattataaacacaaataaagatcgaaaagcgttgacaggaagcagtaggaagcctctctttcaaagagagccgatgggtggtgcgaatcggtgaaagatgctgtccgaatccgtccttgagcgaaatgctgaaaacaagtaggcatttacgggaaaaccgttatgtgttaaagcgggaagcaagtgtgagcttgttttcaatcagggtggcaacgcgagagctctcgtcccttttaggggatgagggctcttttttattttcgataaaaacagataggagttgttaggcatgattgatacgaaggtgctgagagccaattttcaagaggtaaaagcgaagctcattccaaaaggcgaagacttatctgactttgacaagtttgaagagctggacgaaaaaagaagagagcttatcggtaaagtagaagaactgaagggaaaacgcaatgaagtgtctcagcaggtcgccgttttgaaacgggagaaaaaagacgctgatcatattattaaagagatgcgcgaagtgggcgaagaaattaagaagcttgatgaagagcttcgtactgtcgaaacgacgcttgaaaccattcttctgtctattccgaacatcccgcacgattcagtgcccgtcggggaaacggaagatgataacattgaaatccgcaagtggggagaggcgccggcattttcatatgagccgaaaccgcattgggatatcgcagaccatttaaacattcttgatttcgaacgcgcttcaaaagtaacaggcagccggtttgtgttttataaaggattaggcgcccgcctcgaacgcgcgctctacaactttatgctggatcttcacgttgatgaatatgattacacggaagttattcctccttatatggtaaaccgtacgagcatgacaggcacgggacagcttcctaaatttgaagaggatgcttttaaaatcagagaagaggattatttcttaattccgacggcggaagtgccgattacaaatatgcaccgcgatgaaatcttatccggtgagaacctgccgatcaattatgccgcattcagcgcttgcttccgttcagaagcgggatctgccggtcgtgatacacgcggtttgatccgccagcatcagttcaacaaggttgagcttgtgaaattcgtgaagccggaagattcttatgaggagcttgaaaaactgacgaatcaagctgagcgggtgcttcagctgcttgaactgccgtatcgtgtcatgagcatgtgtaccggtgatctcggctttacagccgcgaaaaagtacgatattgaggtatggattccaagccaagacacataccgtgaaatttcttcttgcagtaactttgaggccttccaggcgagacgcgcaaacattcgattcagacgcgaagcgaaaggcaagccggagcatgtgcatacattaaacggttcaggtcttgcagtcggcagaacagtagctgccatcttagaaaactatcagcaggaagatggaagtgtcatcattccgaaagtgcttcgtccttatatgggaaataaagaagtcatcaaaccataaaaaggtgcgccctagaggcgcgccttttttgctgcccggtatagagcggcggcattccgggctgtgctttcaaggttaaaaaggccggatgctaaggcgtcttcaagacttacagcgccgggcacgatagaaaatacagctgttattcctgcgctgtaaacatgctcgaaattcttgcctaaggagcccgccaatgcgataacgggaatttcttgagcagatgcgcgttcggcgatcccggcgggggttttgccgaatatcgtttgtccgtcaatctggccctctccggtaatgacaaggtcagcgcctcttatctgatctgagaaggacagtgtatctaatacaacgtcaatcccgctttgaagttctgcttgtaagaaagcgatcagtccggcgcctaaacctcccgcggcgcccgcgccttttacggtatccgcttcgatatcgtgctgacgtctcaatacgtcagcgaaatggcgtaagttgcgatccaatacaactttagtcttctcggacgcccctttttgcgggccgaagacatatgacgcaccgtttttaccggtgagaggattttcgacatcacatgcggcacggatacggatatgtttcagatcaggagagagaccgtttatatcaatagaagctagggtgtgcagagcgcctccgccgtcaggtatctcctgaccttcctcatttaagaaacgcacaccgagcgcgctcgccattcctgttccgccgtcattggttgcgctcccgccaagtccgatgatgatctcacccgccccgcgggaagctgcatctgctatcagttcaccagttcctcttgtcgttgtgttcaacggatctctgagatggcggggaacgagatgaagtcccgatgcttccgccatttcaatgactgccgtgcgtccgtctcccagaagtccatatgcggcgtttaccggcgttcccagcggaccggtcacagtttttttgatgatgcttccgccagtggcatccgtcaaagcctgaacggttccttctccgccgtcggccgcgggtatcttgatatattccgcgtcagggaagactgctttgaatcctttttctatgctgtcagcggcttcttttgatgtcatgctttctttgaaagaatccggtgcaatgatgattttcattatgttctccacctttatgagcaggtatctgtttgaacctattcttgatttttactgtgttttcctgcccgtatggcatactgaggttgaattggacgcaagacttttgtatgatagtaaagctgacggacaagccgtttaagaaatgaaataaaaaatatgaaaaagcgcttgactgaaatttaggtcatgtggtatattattaaatgtcgatacggaggaatacccaagtctggctgaagggatcggtcttgaaaaccgacaggggtgtcaaagcccgcgggggttcgaatccctcttcctccgccatattgattttaaacctaatgaaactcgagcatatattggagattgttttgtccgctgcatgtgatgcagcggattttttatatgcaaaaaaagcgattttctctgttcggggaaaatcgctttgttatttttatttatttctgttttcgttgatcacgtgactgattttttcgatcaaaggttccagtgactgttcatcagcttcaaggtcataatcttcaatgcgtactttcagcacagggcaggcgttaaaaccgctgatccagtcttcgtaccgtgtatacatctcttcccaataggagcggtttgtctgcagctccatctcgcggccccgcttttcaatccgatttataatgttttcaaggtcgccttctaaatagatcaaaacatcaggatgcgggaagtacggcgtcatgaccatcgcctcaaatagacttgtgtatgttgtgtaatctgtcagcgacatggttcctttatcggcatgcatttttgcgaatatgcctgtatcttcataaatggaacggtcctgcacgaatccgccgcctgattcaaacatgtttttctgctctttgaaccgctcagccagaaaataaatttgcaaatggaagctccagcgttcaaaatcgtgataaaacttctctaaataagggttttcatccacttcttcgagtgaggtatgaaacccgagccgttttgctaaagctttggtcaaagtcgattttccgactcctaccgttcccgctactgtgataatggcgttgtttggaatatgaatgtctttcatttaataagctcctttacctgacgggcaattctttcatagtctgtcttattcaaaacaaagtcttcagtatcaccgtcaatggtcagtacagatatatccggatcttcttcctgaagctgtctgatggctgtgtcgtaatctgcaatgagacgttccagatattgatgctcgatatttttctcaaacgggcgcccgcgtttttcaatgcgttgaagcaatgtcggcaggcttgcctttatgtatacaatgatattcggtttcggcaggtcgtgagtgagcagatgataaatctgcttatatttctcaagcttttggccgtgcaatgtacgctctgcgaaaataacatttttataaatatgataatcggacaaaacgggctgtccttgttttaaataatcccgatcggtgtcttcaagctgtttatacctgtgacatagaaaaaacatttcaagctggaaactccactcctcgatattgtcataaaacttatcgagataagggttgtcttccacaatctcattaatcataggaaaaccgagctcttcagaaagcatcgtagcgagtgtcgtttttcctgccccgataggaccttctaccgcgataaaaggggctctgttcattgaaaatcctccttaattctgcaaacatccgtcagctgccggcctttatattgtatcacactctcagaaaagcccatgaaaaaagacgcttccaattaacgaaacgtctctttcacaatatgaaattgatcgttgagcaaaagccagttttgcgggaaagaaaggccgagtttccaatagctgatccctcttaaatgcagttctttaattaaattgaatttcgcttgaatggatcgtgcgtcttcaaaccatacttcatgccgtctctgattttcatccgtgtaacgaaagaatggagcctgggcggtttcgtcatattgaatgtcgactttatggcgtgctgccagagcgattgcctgctgaggactgacggctttagctgtcgttccctgtttaaaaggcagtgtccaatcgtagccgtacatgttctggcccatgacgatttttgaagaaggcatttccgtcagcgcgtactcaatgacatttcttacagggccgataggtgatacggcctgagccgggcctccgctgtacccccactcatatgtcataattacgacaaaatcgacgatttctccatgtgccctatagtcatgtgcttcgtaccatttgccggcctgggtcgcgctcgttttcggagcaagcgccgttgaaatcttccagccttcccgatgaaaaatcgtcctcgcttcacgtaaaaaacgattgtaggcttctctgtcctgtggacgtaaatattcgaaatcaaagtgaatatcgcgaaagccgtactttttagccgtggagacgatttcctgaaagagttttgttttcactgtattgtcattcaagatgagccgcccgagttcgtcgctgaatgcgtcattttcaaggttggtgatgatcatcatcagggtggtgttgtgcctgtcactgatgctttttaaattggtcagaggcggttcctttaaagtcccgttccgctgcacttgaaaactgaatgcgccaaggtatgttaaataaggagaggcctcccttgccgcctgctgcagattagcgcttacgctcgttccccgcggttctatatatgcgtttgattcgatatcgggcttattcgactgctgcggaatgtaaaggcgggttccggctctcaatgtggtgccgggctgaattccgttaaccctcgtaagctccgcggccgatatatgaaatcggccggcgattgccgcaagagtatcaccttgtttcacttcgtaatattgaccctcaatcgggatgacaagggtttgtccgacaaccaatgtatttggattaggcagtttatttgcttccgcaatgacatttgcggcagtccggtagcgcgccgcaatagcggaaagcgtgtcgccccgtttcactatatagatctgaatgaaaaacgcctcctttcatatccgctatcaaatatatgaaaaaaggaggctgatcatgtttatttttcggcggtaatttgtttttccgtggttatttctgcgaagagaacattctccatcatggtcaaagcgaaatcattgtcttcgtcgttattggaagcggtgcagtctttcggaatggtaatgctgtattctctcatataggcgtcgttggccgtgaacagcacacaaatgttcccggcaatccccgtgatgattaatcggttcacttgtaattcggtcagaagggtgtgaagcgccgtttcgtaaaaagcggaatgcttcggtttaatgagaaaataatcatccggctgaggcgaaatatcttttataatgggggcgcttctgttgttgctgcattcctccctgatggcatcaatatcagccttccagagcccgtaatgatcattaatataaataatcggccagttgctttgttttgcatgcttctttaatgataaaatacgggggacaatttgtttggttttttcagcaagacgttcgcccatatcaaattgaaaattgttgatcatatcgacaatcagaagggctgtgttgttaggttcagacaataccggcaactcctttctgctggggtattcctattttaacctttatgagacatgaaaaaacttaagaagagagctcgaacctatgaatgatgaatattatatgagagaagccataaaagaagcgaagaaagccgaagcgaaaggtgaagtgccgatcggagcagttcttgttctgcatgatgagatcgtggcgcgggcgcataacctgcgggagactgaacagaggtcgcttgcccacgccgaaatgctggcgatagacgaagcgtgctgtaagctggggacatggagacttgaggatgccgttctttatgtcactttggagccgtgtccgatgtgcgcgggagccgtcgtgctttcgagagtcgataaggtcgtattcggcgcatttgatcccaaggggggctgtacaggaacgctgatgaacctcttgcaggaagagcggttcaaccaccaagcggaagtggtgagcggcgtgctcggagaagagtgcggagaaatgctcagcgcttttttcagaaagctgcgccggcaaaagaaagacatgaggaaaaagttgtctgagtagtacggttgcattttctgcctgaagcagatatacttatgtgtgcatcatgaatggtgcgcatataaaaatttgatatttattttgccgtgctaagcggggaggtagcggtgccctgtacccgcaatccgctctagcggggccgaatcccttctcgaggttcgtttactgtaaggtctgccttaagtaagtggcgttgacgtctgggtcctgcgcaatgggaattcatgaaccatgtcaggtccggaaggaagcagcattaagtgaaacctctcatgtgccgcagggttgcctgggctgagctaactgcttaagtaacgcttagggtagcgaatcgacagaaggtgcacggtaaatcaatcatcaaatttcagactcacctgtttatggcaggtgagttttttcgtatatgaaaaacgggttttggcgttaaaagcacgttcatgtataataaacatgatgaataacagaggagggcgcatcctgtgggttaccaagctttatatcgagtatttaggcctcagcagtttgaagatgtggtcggacaggaacacattacgaaaacgctgcaaaatgcccttttgcaaaagaaattttctcatgcatatctgttttctggaccgcggggaacgggaaaaaccagtgcagctaaaatatttgcgaaagcagtcaactgtgagcacgcccccgtagaagaaccgtgcaatgaatgtgcggcgtgcaaggggatcacaaacggctctatatcagatgtgattgaaatagatgcggcgtcgaataacggcgtagacgaaatccgcgacatccgtgacaaagtaaaattcgccccgtcggccgtcacctacaaagtatatattatagatgaggtgcatatgctctctatcggcgcattcaatgcgcttctgaaaacgctggaagaaccgccggcacattgcattttcatattagctacgactgagcctcataagattcctttaaccattatctccagatgtcagcgttttgacttcaaacggattacatccaaagcaattgtcggacgaatgaagacaatcgtcgatgcagagcagctgaaggtggaagaaggagcccttgatatcatagcgagtgctgcggacggaggaatgagggacgcgctgagcctgctcgatcaagccgtatcattcagcggcgaggagctgtcggtggatgatgcattgctcattaccggagccgtttctcagcactatattggaaaactggcatctgctcttcaccgcaaacaggtttccgaggcattggaaacactgaatgaattgctccagcaagggaaagatgcggccaaactgattgaagatatgattttctatttcagggatatgctcttgtaccaggccgctcccggtttagaaggagtcctggagaaggtgaaggtcgatgaaacgtttcggaatctgagcggtgacataccggcccccgctttatatgagatgattgatatcctgaataaaagccatcaggaaatgaagtggacgaaccacccaagaatcttttttgaagtggctgtcgtgaaaatatgccagacggcacagcaatccgccggagacatccctgaggtcggcatgctgatgaataagattcagcagcttgagcaggaagtagaaaggctgaaaacctccggtgtgaaggttcagatggaaagcgctccgaaagaagctccgcgtcctcaaaaaggcggaaaaagccattacaaagctccggtcggaagaattcatgagatattgaaggaagccacaagacctgaacttgaacagcttaaaagcagctggggcaagctgctggcacacctgaaacagcagaataaggtgtctcatgcggctctgttgaatgacagtgaaccggtggctgctgctcaaaaggcatttgtgcttaaatttaaatacgaaatccattgtaaaatggttgcagaagacaataacggagtccgtacgaatcttgaacagattctcgaatcaatgctcgggaaaagaatggatttgattggcgttccggaagcacaatggggtaaaataagagaagaatttttaaatgatcaccagcaggaaagtgaaggatcaaacgaaccggctgaagaagatccgctgattgcagaggcgaaaaaacttgtcggagcggatttaatcgaaataaaagactaataagatgaaagagagtgattgaatatgcgtggcggaatgggaaacatgcaaaaaatgatgaaacaaatgcaaaaaatgcaaaaggatatggcgaaggctcaggaggagcttgctgaaaaagtgcttgaaggtacagcgggcggcggtatggtgactgtaaaagtcaacggccaaaaagaagttgtagacattgccattaaagaagaagtcgttgatccggaagatatcgaaatgcttcaggacctggttcttgctgcgacaaacgacgccctcaaaaaagtggatgacatgacgaatgagacaatgggacaatttacaaaaggaatgaacataccgggtttattctagggggataaataaacatgcagtatcctgaaccaatatcaaagctgattgacagctttatgaaattgccagggatcggaccgaaaacagcggttcgtctggctttttttgttctaggtatgaaagaagacgtggtattagatttcgcgaaagcattagtaaatgcgaagcgcaacctgacatattgttcgatttgcggacatataacagatcaagacccttgttatatatgtgaggacacaagaagggataagtctgttatttgtgtcgtgcaggaccctaaggatgtgatcgcaatggagaaaatgaaggaatataacggccagtatcatgttcttcacggcgcgatttcaccaatggacggcatcggcccggaggatattaagattccggagctgctgaaacgtcttcaggatgatcaagtgacagaagttattctcgcaaccaaccctaatattgaaggggaagcaacagcgatgtatatatcaaggctgttaaagccctcaggcatcaagctctcccgtattgcccacggtctgcccgtcggcggtgatttggaatatgctgatgaggtcactctttcaaaagctcttgaaggaagacgtgaattgtaagggaggaaaaggcaaggcatgggttttcttcgcagaaatacattaagaaaagagtttgatgagaagctgatagaacagctctttaaacaaaaagaagaatggaacagacagaagagtctggtcgagaaaagtctcgagccctccgctgaggtattgtttgagctgaaagtcgctgaatctaagtactttttttatttgaaagaagcgaagcagcggaatttgaaaatgagcagatggaagtaagaggtctattctccgggatcttctcataagcttgtactaaacaagcgagggggaagattcatggagccttttttcattatcggtttgattgtcggtctggttgctttgctttttttatggggagtatcttcaaaaccgttaagatggattggtgtgactgcgattaagtttattgccggtgcgattctgctggtgggtgtgaacttgttcggaggcagtctcggtattcatatccctgttaacctgattacaacgggcatcagcgggattctggggattcccggcatcgcggctttgatagtcattaaacgcttcatcatttaatttgtcgattattgttgacatgttggatcaagggtggtattctaatatacgtcgctgatgacgaaacgaattcttaaaaaagaaattttaaaaagttattgacgactttgaagttgatatgttacaataattaagtcgcttcgagagcgatggacaaagttctttgaaaactaaacaagacaaaacgtacctgttaattcaaagttttaaataaatcgcacagcgatgtgcgtagtcagtcaaactactttatcggagagtttgatcctggctcaggacgaacgctggcggcgtgcctaatacatgcaagtcgagcggacagatgggagcttgctccctgatgttagcggcggacgggtgagtaacacgtgggtaacctgcctgtaagactgggataactccgggaaaccggggctaataccggatggttgtttgaaccgcatggttcagacataaaaggtggcttcggctaccacttacagatggacccgcggcgcattagctagttggtgaggtaatggctcaccaaggcgacgatgcgtagccgacctgagagggtgatcggccacactgggactgagacacggcccagactcctacgggaggcagcagtagggaatcttccgcaatggacgaaagtctgacggagcaacgccgcgtgagtgatgaaggttttcggatcgtaaagctctgttgttagggaagaacaagtgccgttcaaatagggcggcaccttgacggtacctaaccagaaagc

SEQ ID NO: 14 - DNA, 3890 bp, Bacillus subtilis
tcctaagatttcttcaaatatgtccgtaatgactttctctgttttagttcttggtggcatatattcctgtcctgctaatgcatttagttctggcagtgcttttgcatccagcttcccatttggagtcagtggcaaggcatcaatctgcatcataaagccaggtaacatatactcaggcagtttgtctctcaaatcatttttgatttcagacatatccagttgctgctcttgatttgtcgggattaggtaggcacatatactcttgtcaccgcctacttccaatgcaacaacggctacatcagatatacccggctgattccttagaacgctctcgatctcgtacaactcgatccgatatcctcggattttaacctgttcatctattcttcccaggtattccatctctccgttaggcagccatctcgccaaatctccagagcggtataacttcccttcgccatatggattgtcgataaacttctccgctgttaattcaggctggtttagatagcctttggctactccgtctcctgcgatgcatagctcaccaggaacgcctacaccacataactccatctcattcagtatatagagctgcatattggcaatgggatgtccgattcctacacttaaacccttatctttttcgctggaatagacatagtcacagcatcctacagtagtctctgtagggccatattcgttatggatcttgacgctttcacccaatagcttctgcgttttccacgccgtatctgtggtgaactcctctccaccgacaatcagcgtttctaaattcggcacatctacgccgtctgcataggtttccagcatttttaaatgtgacggggtaagcttcaggaaggttaccctgttatcttttaaagctgcacgtaacctttcctccgtatctcctccctttaatagaagagatccaccactaatcagcggtaagaacaaggacgttacggagaggtcgaaacttaagcttgtcattaataccgtcgtacaagcttccttctggtattcttgatctgcatacgacaagtaatgatccaagttacctcgtgtaaccgccacgcctttgggctttcctgtcgttcctgatgtgtaaatcaaataggctatgtcacttttttcaacagcacacgctggatttgtctccttctcacccagatcttcaagattcatcgagatgaatgggacttccgtttccatagtcttctctcttgttaaaatgaccttgggtgctgcatcgtttaagatatgctctattcgttccttcggtgttgctggatcaatcgggacataggcggctccactctttagcacgcccaaaatgccaatgatcgtttccgcttccagggtagtcatgatggccactcgatcattgggctgaacacctaacgaaatcagttcccatgccaatgcattggccttgcggttgacttctccataacgaagtactcccgtttcgtattcgattaccgtcttctcgggtgtctgttccgcatgtttctcgaatcgttctactgccgtattattctgtgcatactccgtatgggtatcattgaaaaccgttagtattctttgttgctctacctcactgaccatgtagagttcagacaatttcatttcagggttagcaatcaccctgtccagcaacaccttaaaatgctccagtatgacctgtgctgaagtctcggtaaataaatcactgcaatataccagatctaaagcgtacccctcttcatacgctgtagcttgtaaatccaaatcaaatttggcatcaatgaaaggaatgcccagcatctctacctgtgcttcgcccattgcaagatggatttcctcgttattctgcatggtaaacatcacgtcaaacagcggattgcgtgacagatcacggcgtacttctacttcctctaccaattcttcaaacgggtattcttgattctcatacgcgtttaaggccagctcttttatctcgcttaaaaactccaggaacgttttctcgccccttggataccctctcattgccagcgtattgacaaacatgccggctattgtctcggtgtcctgatgcactcggcctgagatgggtgttcctaccacgatatcttgttgcctgctgtatttatgcagttctatcataaatacagccagtaaggtcatgtaatctgtcgttccctgttgtttatttatattttgaatgccagctttctgctctcggctaagctgaacagacacttgggctcctttgtagctttgggttttcggacgtggatagtccgtcaccaaatccaaaaccggtgcctcttctttaaatacttctttccaataatccctctgactctccagatttctagcacgcatccattcactataatctttgtattggagttcaagtggttgtaactcttcaccgttatacaatcgtgagaaatcttcgattaatagattgagcgtctgatgatcggaaataatatggtgcatatcaaatagtaaaatatatttgttccgatttctttctttcactactttaaaacgcatgagcggtgctgttccgatgtcaaacgggcgtacaaattgttccatgtcagcgtcactgtagctgtcggtctcttcatattccacttggtagaatacctcgtctgcaatgacttgatatgctccttcttcggtcattacaaaacttgttcgcagcgactcatgacgcttaatcagacgatctatggcttgttgtattttttctacatcaaggttacccgttacttctagcgctgacgccatgttatatgcagtactgttgccttccatctgatccagaataaacaatcgtttctgtgtagaggatgctggataagcttctctctgttctgcttgtggtattggactatattcgccttctcccgcggcctcaatctttctcgacaacatgacaggagttggtgaactaaatatctcttttactggcaaacgaatccctgtcttcttctcgatggcattaatggctgccgtcgcttttaacgaatgtcctcccagttcaaagaaactatcctctatgccgactggagatattcctaagatttcttcaaatatgtccgtaatgactttctctgttttagttcttggtggcatatattcctgtcctgctaatgcatttggttctggcagtgcttttgcatccagcttcccatttggagtcagtggcaaggcatcaatctgcatcataaagccaggtaacatatactcaggcagtttgtctctcaaatcatttttgatttcagacatatccagttgctgctcttgatttgtcgggattaggtaggcacatatactcttgtcaccgcctacttccaatgcaacaacggctacatcagatatacccggctgattccttagaacgctctcgatctcgtacaactcgatccgatatcctcggattttaacctgttcatctattcttcccaggtattccatctctccgttaggcagccatctcgccaaatctccagagcggtataacttcccttcgccatatggattgtcgataaacttctccgctgttaattcaggctggtttagatagcctttggctactccgtctcctgcgatgcatagctcaccaggaacgcctacaccacataactccatctcattcagtatatagagctgcatattggcaatgggatgtccgattcctacacttaaacccttatctttttcgctggaatagacatagtcacagcatcctacagtagtctctgtagggccatattcgttatggatcttgacgctttcacccaatagcttctgcgttttccacgccgtatctgtggtgaactcctctccaccgacaatcagcgtttctaaattcggcacatctacgc

SEQ ID NO: 15 - DNA, 2946 bp, Bacillus subtilis
ggctcatcgcatcctggggctgtagtcggtcccaagggttgggctgttcgcccattaaagcggtacgcgagctgggttcagaacgtcgtgagacagttcggtccctatccgtcgcgggcgcaggaaatttgagaggagctgtccttagtacgagaggaccgggatggacgcaccgctggtgtaccagttgttctgccaagggcatcgctgggtagctatgtgcggacgggataagtgctgaaagcatctaagcatgaagcccccctcaagatgagatttcccattccrcaaggaagtaagatccctgaaagatgatcaggttgataggtctgaggtggaagtgtggcgacacatggagctgacagatactaatcgatcgaggacttaaccaatttgaatgtatgcttactgttatctagttttgagagaacactctcaatggtttggtggcgatagcgaagaggtcacacccgttcccatgccgaacacggaagttaagctcttcagcgccgatggtagtcggggggttccccctgtgagagtaggacgccgccaagcttttttattttatctaccatgtttttgtttatgaagcttataatattccgcagtagctcagtggtagagctatcggctgttaaccgatcggtcgtaggttcgagtcctacctgcggagccattgcttccatagctcagcaggtagagcacttccatggtaaggaagaggtcagcggttcgagcccgcttggaagcttatctaaatacgttgatctgaagcagtttccgcatgttatggaactgttatttttttgttcagttcagtaaaaatctgttactgattgtaccagttaaggtataggtatttagcgcgtcttcagatgaagcctttcttcaagggtgcaaaagagattaacataattaattgttaatcggtattgacttttatcaaaaccttgatataattacttttgtcataatgaacagtatgctttagattattctgcgggttataccgtttggagttttactgaataaataacaatacagtttttgggttatctgatgctgtattctggctgtacattacatttttacttgcggaagtagttcagtggtagaacatcaccttgccaaggtgggggtcgcgggttcgaatcccgtcttccgctccattttatcccaacgggatattgtgaaattgattgcgcccgtagctcaattggatagagcgtttgactacggatcaaaaggttaggggttcgactcctctcgggcgcgccataatatatttaaaaatcgggaagtagctcagcttggtagagcacatggtttgggaccatggggtcgcaggttcgaatcctgtcttcccgaccattctcaaactttaaagataatatactggttttctttttttctctgttttaaaaaaatgcttgatttatagagagacaccgtggtatattattaaacgtcgctgatgaacagcagacaacaactaaaagcttcggaaacaacttgaaaaaagttgttgacataaaagaagctgagtggtaagataataaagctgcttcaacaagcggtaatgatctttgaaaactaaacaagacaaaacgtacctgttaattcaaagttttaaataaatcgcacagcgatgtgcgtagtcagtcaaactactttatcggagagtttgatcctggctcaggacgaacgctggcggcgtgcctaatacatgcaagtcgagcggacagatgggagcttgctccctgatgttagcggcggacgggtgagtaacacgtgggtaacctgcctgtaagactgggataactccgggaaaccggggctaataccggatggttgtctgaaccgcatggttcagacataaaaggtggcttcggctaccacttacagatggacccgcggcgcattagctagttggtgaggtaacggctcaccaaggcgacgatgcgtagccgacctgagagggtgatcggccacactgggactgagacacggcccagactcctacgggaggcagcagtagggaatcttccgcaatggacgaaagtctgacggagcaacgccgcgtgagtgatgaaggttttcggatcgtaaagctctgttgttagggaagaacaagtgccgttcaaatagggcggcaccttgacggtacctaaccagaaagccacggctaactacgtgccagcagccgcggtaatacgtaggtggcaagcgttgtccggaattattgggcgtaaagggctcgcaggcggtttcttaagtctgatgtgaaagcccccggctcaaccggggagggtcattggaaactggggaacttgagtgcagaagaggagagtggaattccacgtgtagcggtgaaatgcgtagagatgtggaggaacaccagtggcgaaggcgactctctggtctgtaactgacgctgaggagcgaaagcgtggggagcgaacaggattagataccctggtagtccacgccgtaaacgatgagtgctaagtgttagggggtttccgccccttagtgctgcagctaacgcattaagcactccgcctggggagtacggtcgcaagactgaaactcaaaggaattgacgggggcccgcacaagcggtggagcatgtggtttaattcgaagcaacgcgaagaaccttaccaggtcttgacatcctctgacaatcctagagataggacgtccccttcgggggcagagtgacaggtggtgcatggttgtcgtcagctcgtgtcgtgagatgttgggttaagtcccgcaacgagcgcaacccttgatcttagttgccagcattcagttgggcactctaaggtgactgccggtgacaaaccggaggaaggtggggatgacgtcaaatcatcaygccccttatgacctgggctacacacgtgctacaatggacagaacaaagggcagcgaaac

SEQ ID NO: 16 - DNA, 1499 bp, Bacillus subtilis
cgcatcgtcgccytggtgagccgttacctcaccaactagctaatgcgccgcgggtccatctgtaagtggtagccgaagccaccttttatgtctgaaccatgcggttcaaacaaccatccggtattagccccggtttcccggagttatcccagtcttacaggcaggttacccacgtgttactcacccgtccgccgctaacatcagggagcaagctcccatctgttcgctcgacttgcatgtattaggcacgccgccagcgttcgtcctgagccaggatcaaactctccgataaagtagtttgactgactacgcacatcgctgtgcgatttatttaaaactttgaattaacaggtacgttttgtcttgtttagttttcaaagatcattttgttcactttctcaagcaactttttaagtatataataagtttcttttaaagtcaacatattttttataaatggtggagcctagcgggatcgaaccgctgacctcctgcgtgcaaagcaggcgctctcccagctgagctaaggccccgaagtggtcgggaagacaggattcgaacctgcgaccccatggtcccaaaccatgtgctctaccaagctgagctacttcccgattttaaaaatattatggcgcgcccgagaggagtcgaacccctaaccttttgatccgtagtcaaacgctctatccaattgagctacgggcgcataataacgaatgccgagggccggacttgaaccggcacggtagtcacctaccgcaggattttaagtcctgtgtgtctgccaattccaccaccccggcgtggatggtatagttggagcggaagacgggattcgaacccgcgacccccaccttggcaaggtggtgttctaccactgaactacttccgcatacaggatagttatcctgtataatgcgggtgaagggacttgaacccccacgtcataagacactagatcctaagtctagcgcgtctgccaattccgccacacccgcgtaacatggtgagccatgaaggactcgaaccttcgaccctctgattaaaagtcagatgctctaccaactgagctaatggctctttttaaaagacttatgttattatcttgtccaaaaatggtgccggccagaggacttgaacccccaacctactgattacaagtcagttgctctaccaattgagctaggccggcaaatatggtggaggatgacgggctcgaaccgccgaccctctgcttgtaaggcagatgctctcccagctgagctaatcctccatatattacacttacgtgtaatggcttggcggcgtcctactctcacagggggaaacccccgactaccatcggcgctgaagagcttaacttccgtgttcggcatgggaacgggtgtgacctcttcgctatcgccaccaaaccattgagagtgttctctcaaaaccagataacagtaagcatacattcaaattggttaagtcctcgatcgattagtatctgtcagctc

SEQ ID NO: 17 - DNA, 1122 bp, Bacillus subtilis
ggcgtacggggaaggacgtcaatagtcacacagtccttgacggtataataaccaccatcatggcgaccatccaaaggataaacatcataggcagtcgggagggtagtcggaaccgaagaagactcaaagcgaaccaaacaggcaaaaaatttagggtcggcatcaaaagcaatatcagcaccaacagaaacaacctgattagcggcgttgacagatgtatccatctgaatgcaatgaagaaaaccaccattaccagcattaaccgtcaaactatcaaaatataacgttgacgatgtagctttaggtgtctgtaaaacaggtgccgaagaagctggagtaacagaagtgagaaccagcttatcagaaaaaaagtttgaattatggcgagaaataaaagtctgaaacatgattaaactcctaagcagaaaacctaccgcgcttcgcttggtcaacccctcagcggcaaaaattaaaatttttaccgcttcggcgttataacctcacactcaatcttttatcacgaagtcatgattgaatcgcgagtggtcggcagattgcgataaacggtcacattaaatttaacctgactattccactgcaacaactgaacggactggaaacactggtcataatcatggtggcgaataagtacgcgttcttgcaaatcaccagaaggcggttcctgaatgaatgggaagccttcaagaaggtgataagcaggagaaacatacgaaggcgcataacgataccactgaccctcagcaatcttaaacttcttagacgaatcaccagaacggaaaacatccttcatagaaatttcacgcggcggcaagttgccatacaaaacagggtcgccagcaatatcggtataagtcaaagcacctttagcgttaaggtactgaatctctttagtcgcagtaggcggaaaacgaacaagcgcaagagtaaacatagtgccatgctcaggaacaaagaaacgcggcacagaatgtttataggtctgttgaacacgaccagaaaactggcctaacgacgtttggtcagttccatcaacatcatagccagatgcccagagattagagcgcatgacaagtaaaggacggttgtcagcgtcataagagg

SEQ ID NO: 18 - DNA, 1071 bp, Bacillus subtilis
gttcatcagcaaacgcagaatcagcggtatggctcttctcatattggcgctactgcaaaggatatttctaatgtcgtcactgatgctgcttctggtgtggttgatatttttcatggtattgataaagctgttgccgatacttggaacaatttctggaaagacggtaaagctgatggtattggctctaatttgtctaggaaataaccgtcaggattgacaccctcccaattgtatgttttcatgcctccaaatcttggaggcttttttatggttcgttcttattacccttctgaatgtcacgctgattattttgactttgagcgtatcgaggctcttaaacctgctattgaggcttgtggcatttctactctttctcaatccccaatgcttggcttccataagcagatggataaccgcatcaagctcttggaagagattctgtcttttcgtatgcagggcgttgagttcgataatggtgatatgtatgttgacggccataaggctgcttctgacgttcgtgatgagtttgtatctgttactgagaagttaatggatgaattggcacaatgctacaatgtgctcccccaacttgatattaataacactatagaccaccgccccgaaggggacgaaaaatggtttttagagaacgagaagacggttacgcagttttgccgcaagctggctgctgaacgccctcttaaggatattcgcgatgagtataattaccccaaaaagaaaggtattaaggatgagtgttcaagattgctggaggcctccactatgaaatcgcgtagaggctttgctattcagcgtttgatgaatgcaatgcgacaggctcatgctgatggttggtttatcgtttttgacactctcacgttggctgacgaccgattagaggcgttttatgataatcccaatgctttgcgtgactattttcgtgatattggtcgtatggttcttgctgccgagggtcgcaaggctaatgattcacacgccgactgctatcagtatttttgtgtgcctgagtatggtacagctaatggccgtcttcatttccatgcggtgcac

SEQ ID NO: 19 - DNA, 1001 bp, Bacillus subtilis
aaagctaccagttatatggctgttggtttctatgtggctaaatacgttaacaaaaagtcagatatggaccttgctgctaaaggtctaggagctaaagaatggaacaactcactaaaaaccaagctgtcgctacttcccaagaagctgttcagaatcagaatgagccgcaacttcgggatgaaaatgctcacaatgacaaatctgtccacggagtgcttaatccaacttaccaagctgggttacgacgcgacgccgttcaaccagatattgaagcagaacgcaaaaagagagatgagattgaggctgggaaaagttactgtagccgacgttttggcggcgcaacctgtgacgacaaatctgctcaaatttatgcgcgcttcgataaaaatgattggcgtatccaacctgcagagttttatcgcttccatgacgcagaagttaacactttcggatatttctgatgagtcgaaaaattatcttgataaagcaggaattactactgcttgtttacgaattaaatcgaagtggactgctggcggaaaatgagaaaattcgacctatccttgcgcagctcgagaagctcttactttgcgacctttcgccatcaactaacgattctgtcaaaaactgacgcgttggatgaggagaagtggcttaatatgcttggcacgttcgtcaaggactggtttagatatgagtcacattttgttcatggtagagattctcttgttgacattttaaaagagcgtggattactatctgagtccgatgctgttcaaccactaataggtaagaaatcatgagtcaagttactgaacaatccgtacgtttccagaccgctttggcctctattaagctcattcaggcttctgccgttttggatttaaccgaagatgatttcgattttctgacgagtaacaaagtttggattgctactgaccgctctcgtgctcgtcgctgcgttgaggcttgcgtttatggtacgctggactttgtaggat

SEQ ID NO: 20 - DNA, 153018 bp, Bacillus amyloliquefaciens
tgaggcgcttcatgaagccggcgcattcgccttcaccgatgacggcgtcggcgttcagacggccggaatgatgtatgaagccatgaaacgggcggcttcaataaataaagcgattgtcgctcattgtgaggataactcactgatttacggaggaagcgtgcatgaaggttctttttcaaaagcgaacggcctgaacggcataccttccatttgtgaagcggtacatatcgcccgtgacgtcctgctggcggaagcggcgggctgccattaccatgtgtgtcatatcagcacgaaagaatccgtcagagccgtaagagacgcaaaaaaagcgggaatccgcgtgacggcggaagtatcgcctcaccatctgctgctttgtgacgacgatatcccgggacttgataccaattttaaaatgaatccgccccttcgcagcaaagaggacagagaggcgctgattgaagggcttttagacggcacgattgatttcatcgccactgaccatgcgccgcatacagaagaagagaaaaacacggacatgaagcttgcgcctttcggtatcgtcggtttagaaacagcctttccgcttctgtacacacattttgtgaaaaacggggcgtggacgctgaagcagctggttgatttcatgacggtgaaaccttgcgaggcatttgatcttccgtacggaacgcttgcaccgggggcgccggctgacatcaccctgattgatctggaaaaagaagcagccattgacaaagatacatttttatctaaaggaaaaaatacgccattcaacaagatgaagtgcttcggctggcctgttgcaacgatggctgccggtaagcttgcatacgaagaagggagactcgtcaaatgaaaagaagactagtgctggaaaatggagcggtatttgagggtgaagcattcgggagcctggaacatacagcgggtgaagtcgtattcaacacgggaatgaccggttatcaggaaattttatcagacccttcttactgcgggcagatcgtgacgctgacgtatcctctgatcggcaactacggaattaacagagatgactttgaatccatcactccttttgtaaaagggctgatcgtaaaagaactgtgcgagctgccttccaactggcgttcggcttacacgcttgacgagtatttgaaaatgaaaaatatccccggcttacaagggattgacacgagaaagctcacaagaatgatccgcacagccggcgcattaaaaggaacgtttgcttcaagtgaggagaatgtcggagaggttcttgcaaggctgaaagaaacggaactgccgagaaatcaagtcgctcaagtatctgcgaaaacggcatatccgagtccgggccgcggcaaacgcatcgtactcgtcgatttcggtatgaagcacggcattttaagagagttaaacaaaagaaaatgcgatgtcatcgttgtgccgtacaatgtaacggcggaagaagtgcttcagctcaagccggacggcatcatgctttctaacggacccggagatccgaaagatgtgccggaagccattgaaatgataaaaggcatactcgggaaggtgccgttattcggaatctgcctcggccaccaattatttgcgctggcatccggagcggaaacggaaaaaatgaaattcggacacaggggttccaatcatccggttaaagagcttgcgacagggaaagtcgctttaaccgcccaaaaccacggatatacagtttcttcaatagatgatacagagcttgaagtgacgcacattgcgatcaatgatcaaacgatcgaaggactcaagcataaaacattgccggcatttacggttcagtaccaccctgaagcttcaccggggccggaagacgccaatcatttatttgacagattcattgacttgatcgaaacaactgagaaagaaggggaagcggtatgccaaaacgcgtagatattaaaaagattttagtgatcggatcaggcccgattattatcggacaggcggcggaatttgattatgcgggcacacaggcgtgtctcgctttaaaggaagaaggctatgaagtcattctcgtcaactcgaatccggcaacgattatgacggatacggaaatggctgatcgggtatacatagaaccgctgacgccggagtttctcacgcgtattatcagaaaagaacggccggacgccatcctgccgactctgggaggacagaccggactgaatcttgccgtcgagctgtctgaactcggggttcttgaggaatgcggagtggaagtgctcggcacaaagctgtccgccatccagcaggcggaagaccgcgacttattccgtacgctgatgaatgagctgaatgaaccggtgccggaaagtgagatcatccgcactttacaggaagccgaggaatttgtcggccggatcgggtttccggttatcgtgcgccctgcttacacattaggcggaacgggcggcggcatctgctcgaatgaagcggaactgaaagagatcgtcgaaaacggattaaagctcagccccgttcatcagtgccttctggaaaaaagcattgccggttacaaagagatcgaatatgaagtcatgagagacagcagagatcacgcgatcgtcgtctgcaacatggaaaatatcgatccggtcggcatccatacgggcgacagcatcgtcgttgccccgagccagactttgagcgaccgggaatatcagcttttgcgcaatgtttcattaaagctgatccgcgcgctcggcattgaaggcggctgtaatgttcagctcgcgctcgatcccgacagcttccaatattacattatcgaagtgaatccgcgggtgagccgctcatctgccctcgcctcaaaagcgacgggttacccgatcgcaaagcttgcggcgaaaatcgcagtcgggctttctcttgatgaaatgatgaatcccgtaacgggaaaaacatatgcggcttttgagcccgcgcttgactatgtcgtttctaaaatcccgcgctggccgttcgacaaatttgagtcggcaaaccgcaggctcgggacgcaaatgaaagctaccggagaggtcatggctatcggacgcacccttgaagaatcgctgttaaaggcggtccgctcacttgaagccgatgtctatcacctggaactgaaggatgcggaagagatttctgacggacttttggaaaaacggatcagaaaagccggggatgaacgcctgttttatcttgctgaagcgttcagaagaggctatacagtggagcagcttcatgagttttccgcaattgacgtattctttttgcacaagctctgtaagctggtcgcttttgaaacagagctgaaagcggaaaaaggcagcctcgccgtccttcagacagcgaaggaactcggtttctccgacaaatatatcagccgggaatggaatatgccggaacaagagctgtatcaaatgcgaaaagaagcagacatcaagcctgtatataaaatggtggatacatgcgcggcggaattcgaatcagaaaccccgtacttctacagcacatatgaggaagagaacgagtctgaggttacttcgagaaaaagcgtcgtcgtcctcggttccggcccgatccgtatcggacagggcgtcgaatttgactatgcgaccgttcattctgtctgggcaatcaagcaggcaggctatgaagcgattattatcaacaacaatcctgagacggtgtctactgatttcagcatatcagacaaactgtattttgaaccgctgacggttgaagatgtcatgcacatcatcgatttggaacagccggaaggcgttgttgtccaattcggcggccagacggcgatcaaccttgcggaagaattgagcgcccgcggcgtcaaaattctcggcacatcacttgaagatttagaccgtgcggaagaccgggataagttcgagcaggcgcttgaggcgctgaatgtgccgcagccgctcggaaaaaccgccgtgtcggtgaacgaagcggtcaaaatcgccgcatccatcggctatccggtacttgtccgcccttcgtatgtgctcggcggccgggcgatggaaatcgtctatcacgaagaagagctgcttcactatatgaaaaacgcggtcaaaatcaacccgcagcatccggtgttaatcgaccgttatctgacggggaaagaaatcgaagtcgatgccgtatctgacggcgaaacagtcgttattccggggattatggagcatatcgagcgggccggcgtccattcaggggattcaatcgccgtctatccgcctcagtctttaagcgaagacattaagaaaaaaatcgaacaatacactgtagccttggcaaaaggccttaacatcatcgggttgctgaacatccagttcgtactgtcgcaaggtgaggtgtatgtgcttgaggtaaatccgcggtcaagcagaaccgtgccgttcttaagcaaaatcacaaaaatcccaatggcgaacctggcgacaaaggtcattctcggccaaaagcttgctgatttcggctatcaagaggggctgcagcctgaacagcagggggtattcgtgaaagcgcctgtcttctcattcgcgaagctgagaagagtggatatcacgttaggccctgaaatgaagtcgacgggagaggtcatgggcaaagattcaaccctggaaaaagcgctctataaagcgctgattgcctctggcattcaaatcccgaactacggctcagtgctgttgaccgttgccgataaagataaagaagaaggactgctgatcgctaagcggttccacgccatcggctataaaatcttggcgacggaaggaacggcggcttatttgaaagacgctcagattccggctcaagtcgtcggaaaaatcggcgaagaagggaaaaatctgctcgatgtcatcagaaacggcgaagcgcaatttgtcatcaatacgctgacaaagggcaaacagccggccagagacggcttcagaatccgccgcgaatccgttgaaaacggagtcgcctgcctgacatctttagatacggccgaagccattttgcgggtgttggaaagcatgacattccgggcggatcatatgcctgcatccgaaaccaatcaaaaggcggcagtcacgatatgaagaaagcgcatttgactgttcaatccaacttagaaattgccgaccgggtttataagatggtgctgaaaggagagcttgtccggcaccttaccgagccgggtcaatttcttcatctgaaggtgagtgacgcggtcacgccgctattaagaagaccgctcagcattgcggacgtcaatttcgctgcgaatgaagtatccgttatctacagagctgacggtgagggaacgcgtcttttgtccgagaaaaaagagggcggcaggatagacgttctcggccctctcggcaacgggttccccgtccggcggattgaacccggcaaaaccgcgctgttagtcggaggcggagtcggggttccgcctttgcaggaactgtcaaagcgcctgacggaaaaaggcgtaaacgtcattcatgtgcttggatttcaatcagcaaagggtgttttttacgaacaggaatgtcgtgcgtacggagacacctatgtggcgacggctgacggaacatatggagagaaagggtttgtcaccgatgtcatccgtgaacagcagctcgaattcgatgtcctgctaagctgcggaccgacaccgatgctgaaagctctgaagcagcagtacggccataaagaggtttatctttcgatggaagagcggatgggctgcggcatcggtgcctgcttcgcctgcgtgtgccgcacgggtgaaagcgatacatcctatgtaaagatctgccttgacgggccggtatttaaagctgaggaggtggcgctgtaatgttagaggtgaatctgccgggtctccaattgaaaaatccgatcatccccgcttccggatgtttcggattcgggaaagaatatgccggattttacgatttatcatgtctcggaggcattatgattaaagcaacgacgaatgaagcccgcttcggaaatccgacgccgagagtggcggagacaagcgcgggaatgctgaatgccatcggactgcaaaatcccggccttgagcatgtgctcaatcatgagctaccttggctcgaacaatttgacacgccgattatcgcaaatgtcgccggttctcaggtggacgactataaagaagtggccgagcacatcagccaagcgccgaatgtgcatgcgcttgagcttaacatttcatgtccgaatgtcaaaacgggggggattgcttttggtactgatcccgtcatggcggccgaactgacaaaagcggtgaaagaagtttccgcagtgcctgtgtatgtgaagctttcgcctaatgtcgcaaacataaccgaaattgccaaagcgattgaagcggccggtgctgacggtctgacgatgattaatactctcatcgggatgaggctcgatctcaagacgggccggccgatcttagcaaataaaacgggcggactgtcaggcccggcgatcaaaccggtcgccatccggatggtatacgaagtcagccaggccgttcaaattccgattatcgggatgggcggcgttcagaccgcagaggatgcattagaatttcttcttgcgggagcaagtgcggttgccgtcggcacggcaaacttcgtcaatccgttcgtctgcccggaaatcatagaacagcttccccgtgtgctgcgccaacacggctttcaatctgtaagtgaatgcatcggaaggagctggaaacatgaaaaacaacctgcccatcatcgcgcttgattttgcatcaggggaagagactttaacgtttttagacttgtttgaaaaggaaaggctttttgtcaaaacggggatggaacttttttatcaggaaggccccgccatcattcaccaattaaaagaacggaactgtgatatatttttagatttaaagcttcatgatatcccgactacggtcaataaagcgatgaagcggctggccggcctcggcgttgatctcgtcaatgtgcatgcagcagggggcgcacgcatgatgcgcgcggcccttgaggggcttgaagaaggcacgccggcaggcagaaaacgcccgtctttaatcgcggtgacgcagctgaccagcacttcagagcaggtggcgaaggaagagcttctgctgcataagccgctgttagaaacggttgtgcattacggcaaaatggcggaagagtgcgggctggacggagtggtatgttcggtacatgaaacaaaagccatttatgaagcggtccggccttcatttctgacagtcacgccgggcatccgcacggccagtgacgcagctgacgatcaagtccggacggcgactccgtcatttgcgaaagaaaacggttcgtcagcgatcgtcgtgggccgctcaattacaaaagcggaaaaccccgttgaagcatatgaagcaattaaactggaatgggagggcgttcgccgatgaaacaggctatcgcaaaacatctattacacattgaagctgtctttttacgcccgaatgagccgtttacgtgggcgagcggcattttatcaccgatctattgtgacaaccgtctgacattgtcgtatccaaaagtgagaaatgatgtggcggacgggctcggcaaactgctgaaagagcatttccccgaggcggagatgatcgcgggcactgcaacggcgggcattccgcatgctgcgcttctagcagaccgtacaggcgcgccgatgtgctacgtcagaagcaaaccgaaagcgcacggcaaaggaaatcaaatagaaggcgccattaagaaaggacaaaaaacagtcgtgattgaagacttgatttctaccgggggcagcgtgcttgaagctgcggcggcccttcaaagagagggcgcggaagtcctcggcgtcatttccatttttacatacggactgccgaaagcaaaagaagcctttaaaaaagcgggtcttccttattactcgttaacggattatgacacgctgattgaagtcgcgcttgcaaacggaacgatacattcagatgacattgaaaaactgaaatcatggaaacagaatcccgagtcaaaagattggtttaaaaaataatgacaataaaaacaggcctcagggcctgttttattattcctatcaaaaaactcgggttgacttctgttagaattgtgctaaaatttagtacaaatctaaaaagcttatcaagagcggctgagggactggaccgatgacgcccggcaacctgcgtgtcatgcaaggtgccgcatccagaaaaatgcacagcattttgaagataagggctataccgggtcactgtctttcattccgctggattgaaagttttttatatgaaaaaaagattgagggataagacaaccggcagaaagcaacagctgtttgattgtctccgggaggaggaaaggaaaaatgctaacgtatgacacatgggaagagccggcgattacatttccggaagacgattcctataaaggcgcgctgtccgttttaaaatgggcatacggccactacggagaccagcttgtttacgcgtgcagcttcgggattgaaggcatcgtcctgatcgatttaatttctaaagtaaagaaagacgcggaaatcgtgtttctcgatacgggtcttcactttaaagaaacatatgaaacgatcgaaaaagtgaaagaacgttatccggggctgaacattatcctgaaaaagccaagccttactcttgaagaacaagccgaggctcacggagataaactgtgggaaagagaaccgaaccagtgctgctacatcagaaaaattctgccgttaagagaagcgctcgcggggcatccggcatggctgtccggtcttcgccgggatcaagggccgagccgggcgaatacgaatttcctgaataaagacgacaagtttcaatcgattaaagtatgcccgctgatccattggacatggaaagacatctggagatatacttccaagcatgagctggattacaatatcctccatgatcaggggtatccgagcatcggctgtgaaccgtgcacttcacctgcgtttaccgcggaagatttgcggagcggcagatggaacggcatggcgaaaacagaatgcggactgcatgaataaaggagctgcacgatggaattagccgctattttattctgcctgttttttgccatgaatatcggagccagcggagccgcggcttcaatgggagtcgcttacgggtccggcgccgttaaaaagaaaacgtatgcgctgatcatctgcgcggccggagtcctgtcaggggcggttatcggcggcggtgaagtcgttaagacgatcagcggcggaatcattcccgaacaaaccattacgctcaccattgtctgcattattatcggatcggcggcgctatcgttattcacggcgaatgtgctgggcattccgctgtcgacgagtgaggtcactgtcggggcgattgtcggtgtcggcgtcgcgtacaaagtattgtttttacagcatcttttggtcatcgtgagtttttgggtgctcgtaccgtttgtcgcgttctgtttcacgtttctcgtctcgaaggtattcagttctctgaatattcgagtcatttcgaatcggaaacagaagattttagggattgtgctgctgattgcggggttttgggaagctttttcagccggaatgaacaatgtcgcaaatgcggtgggccctctggttgcggcgggcgtgctcagcgtgtccaaaggaacgctatacggaggcatctttgtcgctttcggcgctctgcttttaggacgtaaagtgcttgaaaccaacgggaaaaagattacgagattttcagccggagaaggcatactgctttcaggaaccggcgcggggcttgtcattatcagttccgtcttcggtctgccggtcccattggcgcaagtcacatcatcatcaattatcggtatcggaatggccaaaaacgggccgaacgtttttcataaagaagtcgtgaaaacgatgctcaaagtatgggtcgtttcgccgtttttgtcactgtcgatttcgtatctgcttgtctccctgctgttaaaaggagattactattccatctttatgatggccagcgtgcttttggcagctggcggagccgccagtctgatgaaagccatccgaaaagagaaacgctctgtccatgaacaaggcggaggcatttaactattaatctgagtttatttatctgttaactgggaggaatcatgtattatgagtttagcaccgcacggaggaacattaattaatcgggtgaatgagcagtatgatcttacatccgtccaaaaagaaattgagcttgatttgatttcgttcgctgatttagagctgatcgggatcggggggtacagcccgattgaaggatttttcacagaaaaagattacgtgtcagtcgttgaaaatatgcgtctggcatccggggctgtctggtccctgccgatcacgcttccggtcgattcagaaaaagcggctgagcttgccgtcggcgacacggtgaaattgacttacggcggagaaacatacggcgtagtcgacatcgaagatatttatacgccggataaacaaaaagaagccgttcacgtgtataaaaccgatgatgccgcgcatccgggcgtgaaaaaattattttcacgcggcgatacgtatgtcggcgggccgatcacattaattaaaaaagcgtcaaagcagtttcccgagtttacatttgaacctgccgatacaagacgaagcttcgaagaaaagggctggaaaaccattgtcggtttccaaacgagaaatccggtccaccgcgcccacgaatatatccaaaaaaccgcgcttgagacggtagacggtctgtttttgaacccgctcgtcggtgaaacaaaatcagatgatattccggcggatgtcagaatggaaagctaccaggtgctgctcgatcattattatccgaaagaccgcgttttcctcggcgtatttttggcggctatgcggtatgcggggccgagagaagccattttccacgcgcttgtccgcaaaaactacggctgcacgcatttcatcgtcggccgcgatcatgccggcgtcggtgattactacggcacatatgaagcgcaagagctgtttgatcaatttacagcggatgaactcgggattacaccgatgaaattcgagcacagcttcttctgccggaaatgcggtaacatgggaacggccaaaacatgcccgcatgaaagagaagaccacgtcattctgtcaggaacaaaggtcagagagatgctgcgaagcggcgtcatgccgccggcggaattcagccgtcctgaagttgtcgaggtgttgattaaagggctgaaaacgaaagaagaagcaggcgtttcttaaggaggaaaatagagtgacaaatcgtgatatcgtgtggcatgaagcctcaataacgaaagaagaataccagcagaaaaacaagcataaaagctctatcctctggctgacgggcttaagcggttcagggaaatccacgattgcaaacgccgcagcgcgcgagctgtttgaacaaggctatcaagtcatcgtgcttgatggtgataacatccgccacggcttaaacaaggacttaggtttttccgatgatgaccgcaaggaaaatatacgccgcatcggggaagtggcgaagcttttcgttcagcagggaaccatcgtcatcacggcttttatttctccgttccgtgaggacagagatcaagtgagagagcttgtggcagagggcgaatttaatgaaatctatgttaaatgcgacctcgatatatgtgaaaagcgcgatccgaaaggtttatataaaaaagcaagaaatggtgaaattccgttctttacggggatcgactcaccgtatgaagagccgaaagcgcctgagctcgtacttgattcaggcaaatgtgaacgcgaagaatgcaccggaagactggttgactttgtgaaaaacagcttagcataataggtccaaaaaggccgcgcaatcagccggatatcccccgcaatggcgggatatggtaaaatagctgaagtgcggcctcgcggctgttctgggaagagttcaaaacggatcggggagacatgctatggggaaagtatttatcgttggagccggtccgggagatccggacttattaacggtgaaggcaatgaaagccatacagaaagcggacgttatattatatgacagattggtaagcaaagagattttacagtatgccggagaagaggcggatctgatttactgcggcaagctcccggattttcacattatgaaacaggatacgatcaaccgtttccttgtgaagtatgcgaaaaaaggaaaaaccgttgtaaggctcaagggaggcgacccgtttgttttcggccgcggaggcgaagaagcggaggctctcgcgcaaaacgccattccgtttgagatcgttcccggcattacatcaggaatcgcggctgctgcttatgccggcattcccgtgacgcatagagaggcgagctccaatgtcgcattcgttacgggacattataaacaagaagacgactttgaagaaaaatggaaagcgctggcgacgggcattgatacgctggtgatttatatgggaattaaaaatatccggcagattgaaagaatgctgctggaaaacggcagagacgccggcaccccggcagcctttattcattggggaacgacggacaggcaaaaaacagtcgtctgcaccgtcggcacgctttcagacaccgtgataaaagaagaaatcaaaaacccgagcttaattgttatcggtgatgtcgtcaattatcactgcaaactggactggtatgcatctgatcagaaaaatctggatttgagcgaggcgttgtaaatgaagcaggcgattttatacatcgggcacggaagcaggctgaaaaaagcgcagacagagtcggcggcgtttttaaaagggtgcatgccgcacgctgacgctcccattcaggaaatttgttttttagaactgcaggaaccgtctattgaagcgggatttgaagcatgtgtcagacaaggcgccactcatattgcggccgtgcctttgctgctgttgaccgctgcccacgcaaaacatgacattccggctgaaatcgcccgtgcggcggccctgcatcccgatataaaagtgacatatggtgttccgatcggagtggacgatgaagtcgtaaaagcggtgcatcatcgcattgaagataccggagtgcccattgagcaggcgaaagtggtgctgatcggaagaggaagcgcagatccggcagttaaaaacgcagtcagtgagattgccggaaaacttgaggcgattacacctgttaaagaagtcatcccttgttttttaacagcatgtgacccgcattataaagaagtgtttgccggccttgaagaggatgacggagcacccgtttttatcgttccatatcttctgtttaccgggcttttaatgactgagattgaacgggaagttcaaaagcttcaaacgatcaatcaaaatgttcatctcgcttcatacttaggttttcaccctcatattaagcaggcgtttttgaaccgtgtgtcagaagctgttcgaaaccccggcggtcagtttgattttaaggggggacagtatgctgcctctgcacattaatttaagcggaaaaagaattatcatcgcgggcggaggcaatgttgccttaagaaggctcaaaacggtgcttccggaaggcgcggatattactgtaatcagtcccgatgccctgcctgaaattaaacagctggcagatgaaggacgtatccgctgggtttcccgtaaaattgaaatgaaggatctcgcgcccgcttttttcatcattgccgcgacaaatgaccgcagcgtgaatcaggagatagccgcgagcgcttctgaaacgcagctggtcaattgtgtaagcgatgctgaacagggcagcgtgtatatgccgaagatcattcgcaaagggcgcattcaagtatccgtatcaacaagcggcgcaagcccggcacatacgaaaagactggctgaggacatagagcctctcattactgctgatttggctgaagaagtggatcgattatttgagaaaagaagaagaccataaaaaacaccttgtctgtcatcaggcagggtgttttttatactgtcctcacagtccccgaatgtgaacaattcaaaacgaaagcgggcagtttgaatggtatatgccgacaagcggtcagggttgcgaagtgatgcggaatatatatctgatcccaatgccgcctggattccgcccgcatacaaaggaaaggtcagagacccgcccgtatgtgctcaggtgcggcgagggaaggtgacagtgtccgccgccaaatcaaggtgtgaccgctttaatcacagacggcccccggcggatcaggcagacatgacgggaaactgatcagatactgtaaagatcggttctgacggctgggagagtttcgtctccgtttatacgtaataaaaaacacctccaagctgagtgcggatttcagcttggaggtgcgtttattttttcagccgtatgacaaggtcggcatcaggtgtgacaaatacggtatgctggctgtcataggtgacaaatccgggctttgctccgtttggctttttcacgtgtctgatttttgtataatcaacgggaacggagccggaatctttcgctttggaaaaataagcggcgatcgcagccgcctccagtatggattgttcatccggatcgctgcttttaatcacaacgtgggaacccgggatgtctttcgtgtggaaccataaatcatcccttgcggcagcttttgtcgttaagtactcattttgtttattgtttttgccgacaagaatcgtcaatccccgtgaagattcatattgctccaaaacaggaacgtgctgcttctgttttttctgtccccgctgctgtttcggtcgcagatatttgccttccacaagctcttcccttatttcgtgaatatcctttgtggaggcggaggagagctgctggatcagctgatcgaaataagcgatttcctcctcggccagacggatctgttcttttaccacctcgacggaattcttcgccttttgatactttgtaaaatacatctgcgcgttttctgacggtgttttgttcggatttaaagggatggtcactgtcttactttcttcatcataataattgatgacttccgcttctttgtcaccttttttcagcatatacaaattcgccgtcagcagttcgccgtatagctggaattccttcgcattctctgagtagtcgagcgtcttttccagtttttttatcttattggcgttctttttccgttcatttgcgacaaaccgctcgagatcctgagcctgctgtttgacgcggtcgcgttccgccttgccgaaataaaaccggtccaacagctcactcagagagtgaaaggtgcgctcctctccgtttacatgtgtgagagacaggagataaaagtattcctttccgccggctgttgtaatgttcggtgtaaacctgcaatctttcacggcatggaacatttcaatcagcgtcttcggcagcgttattttgttagcgagacccgctctgtgcacggcttcttttgcaaacagcggagaaacaccggagaagtgtctgacgatctgctggtcaagccgtccttcctgaaaactgagataacgcaaaacgtcctcttcatccgcggcaagcggcgaaattttttcctgagcgggaggaagcttgtaatcatagcccggcagaacggtccggtagctgttcatcgacggagataaatgcttcagcccgtcgatgatggctccttctccgtcagtcagaataatattgctgtgccgccccataatttcaacatacagcgttctgacggtttcgtcgccgatttcatttctgctttttatgcggaatatcataatccggtctaatccggcctgttctattttctcaataaatccgccttctatatgctttctgagcagcatacaaaacatcggcggctcgctcggattttcataggcctggtttgtcatgtgcacccgtgaatagctcggatgcgccgataataataatttatggttttttccgttagcgcggatatggaatatcacatcgtgcttaaaaggctgatggactctcgtgatccggcctccggcgatccggctgtttaattcatgtgtcattccgtatgtaaacatgccatcaaaagacatataaaacaccctttccttcttcctgcattcgataattatagcatgaaaagggacgagtcagaataagcttgtttacagagtgacatctctaaagcgaggcaggggagtggacgagaagaatgaagtttcatgaaatgggacaaaccgatttgctgaaagcaacaaatacgtccattaaacaggggttgaccgaaaaagaggtgaaaaaacgccttgaaaagcacggaccgaacgagcttcaggagggcaagaggacaccggcgatcgccgtgtttttcgcccaatttaaagattttatggtgctcgtgctgctggcggcaaccttaatatccgggtttttaggcgaatatgtagatgccgtagcgattatggcgattgtatttgtcaatggggttctcggtttttttcaagagcggcgtgcggaaaagtctttacacgcattaaaagagctgtcaacgccgtatgtgtcagcgttacgggacgggagctggaagaaaattcagtccaaggagctcgttcccggcgatatcatgaaattttcaagcggcgaccggattggtgcggatgttcggatcgttgaagcgaaaagccttgaaattgaggaatcggcgctgaccggggaatcaattccggtggttaaacaagctgataaactgagaaagccggatgtttcgttaggcgacatcagcaatatggcgtttatgggtacgatcgtaacgcgcggcagcggtgtcggcgtcgtcgtcggtacaggaatgaatacggcaatggggaaaatcgccgatatgctggaatccgccggcagcctttcaacaccgctgcagcgaagacttgaagagctcggcaaaattttaattatcgtcgcgctccttttaacggtattggtcgttgcagtcggcgtcttacagggacatgagctttacagcatgtttttggccggggtgtcattggccgtcgctgcgattccggaagggctccccgccattgttacggtggcattatcaatcggcgtccagcgcatgatcaaacaaaaatcaattgtcagaaagctcccggcggttgaaacattgggctgcgcctctgtcatttgttctgataaaaccggcacgctgacacaaaacaaaatgaccgtcacccatatgtggtcagggggaaaaacatttaaagtgtcaggcatcggttatgagccggagggcgttttcacccgaggtgagcgggaaatcaagccgaaagatgaaaagattcttgaacagatgctggttttcggcgcgttgtgcaatacatccgaaatcgcactgaaagacggccattatgtactcgacggcgatccgacagaaggagcgctgctgacggctgcaagaaagggcggctattcaaacgattggctcagcgggcaataccgcgtggttgccgagtttccgtttgactccgtccgcaaaatgatgaccgtcattgtagaggataaggaaaaaaagcagttcgtcatcactaaaggagcgcccgatgtgctgattgaccgctcgtcacatctgatgtacgacgcaagaagcgcgccattttcaggagaaaagaaagcagaaacggaagcggttctgaaagagctggcgtcgcaagctttgcgtacgatcgcgattgcttataaaccgcttaagctcggagaaaagccgacaatggagcaggcggaaaaaaatctgacgatgctcggcttgtcaggcataattgatccgccccgtccggaggtcagacaggcgattaaagaatgccgtgaagccggcattaaaacggttatgatcacaggggatcacgtcgaaacggcaaaggccattgcgaaagatttgcgtcttcttccgaaaaaggggcgtgtgatggacgggaagacgctgaatgagcttacggagaaagaacttatcgaaacggtcgatgatgtctacgtcttcgcacgcgtgtcgcctgaacataaattgaaaatcgtcaaagcgttccaggaaaacggacacgtcgtcgccatgacgggagacggggttaatgacgcgccggccataaagcaggcagatatcggtgttgccatgggcgtgacgggaacggatgtggcaaaggaagcctcttctctcattctggtagatgataactttgctacgattaaatcagccataaaagagggacggaatatctatgaaaatataagaaaattcgtccggtatttgctcgcctccaacgtcggtgaaattttagtgatgctgtttgcgatgcttctcgctctgccgctgccgctcgttccgattcagatattgtgggtgaacttagtcactgacgggctgccggcgatggccctcggtatggatcagccggaaggagatctgatgaggcggaagccgcggcatccgaaagaaggagtgtttgcgagaaaactgggctggaaagtcgtatcaagagggtttttaatcggagccgcaaccattttagcgtttatcatcgtctatcaccgcaatcctgaaaatctgccctacgcacagaccgttgcattcgcgactcttgtcctggctcagcttatacacgtgtttgactgccggagcgaaacgtctgttttctcccggaatccgtttgaaaatatctatctgctcggcgccatcatttcttctatcttcctgatggtcatcgtcatctattatccgccgctgcagccgattttcaaaacagtgccgattacgccgggcgattggatgctgattatcggtatgtcgggcatacctacttttttgctggcgggttcacttttgacaagaaaaaaataattccatatgatataatcttaggggtaatagcatgtctattgcccttttattttgataacgggaaagaattgggtgtttcatatgatacggagtatgacaggcttcggcagcgcaagcagcacaaaaggcgatctctcggcaaccgttgaattgaaatccgtcaattaccggttcaaagaagtgaacgcccgcctgccacggcctttgctatatgtagaggataagctgaaacaaacgatattgcagcatatacagcgcggaagagtagagctgtttctcactgtaaacagtgacgcgctcataaaaagaagcctgaacatcgattgggagctccttgatgaatatgtgagcgccgcacgcgtcatgaaagagcgctacagcctggccgcagaacccgatgcaatggatttctttaaatttgaacatattgcgcagatacacgaagaacagatgcgtgatgacaagcttgaagaagtcatcagggaagccgctgagctggctgtaaaggaactttgtgacatgagggaaaaagaaggccggcttttggcggaagactgctttctgcacattgagcggcttgagacgctgtccgaacaggtaaaagagcgcgcttcggccgttgttattcaataccgcgagcgtctttacgcccgaatgaaggaatggacggaggacgcgctcgacgaaagcaggctgatcacggaatgcgccattttcgccgaccgttctgatatcacggaagaaattaccagattgaagagccattttgttcaattccgtgatatattaaaagaaggcggggcagtcggccgcaaacttgatttccttgttcaggagcttaaccgggaagcgaacacgatcggctcaaaagccaatgatcatcaaatcacaaagcttgtcgttgaaatgaaaagttctattgaaaaattgaaggaacaagtgcaaaatatagaatagcgactgtgcgtattgtttacagacggtctcttcaggttacactagagacgtctattttacagggggaacgtagaagatgacgattaaactgattaatatcggatttggcaatatcatctccgccaatcggatgatttcgattgtcagcccggagtctgcgccaataaagcgaatgatccaggatgcaagagaccgcggaatgctaatagacgctacatacggacgaagaacccgtgcagttgtcgtcatggatagtgatcacattatcttatctgccgtccagcctgagacagttgcacacagactttctgtgaaagaagaaattatggatgaagggcaggggtaattgccgcatgaaagaaagagggttattaatcgttctctcaggtccctccggagttggaaaaggaacggttcggcaagcaatattttcacaacaggacacgaaatttgaatactcaatttcagttacgacgagaaacccgagagagggcgaggtcgacggcgtcgattatttctttaaatctagagatgaattcgaacgcatgattgaaaacaacaaactgcttgagtgggcggaatatgtcggcaactattacggaacgcccgttgattatgtcgaacagacgcttcaagaaggaaaagacgtcttcttagagattgaagtgcagggcgcgctccaagtgcggaatgcatttccggaaggcctgtttatcttcttagcgccgccgagtctttctgagctgaaaaacagaatcgtaacaagagggactgaaaccgacgatttaatcgaaaacagaatgaatgccgcaaaagctgaaatcgaaatgatggacgcgtatgattatgtcgttgaaaacgacgatatccaaacggcttgtgataagattaacgcaatcgttctcgccgagcacttaaaacgtgaacgcgtcgctccgagatataagaaaatgctggaggtagaataacttatgttagatccgtcaattgactctttaatgaataaattagattctaaatatacgctggtgaccgtgtctgcaagacgcgcgcgtgaaatgcagatcaaaaaagaccagcagattgaacataccatttctcacaaatatgtaggcaaagctttagaagaaattgacgcgggcctgctttcgtttgaaagagaagacagcgaataacaagcacacgtagcaacctatctctacataggttgttatttttttccgtttgggatttgtccaatgctttcataaaggggagaagacttcatgaaaaaccgaaacattttgctatgcgtaagcggaggaattgccgtttataaagcttccgcactcacgagcaagctggttcaggccggcgcaaacgtcaaagtgattatgactgattccgcgcgtgagtttgtttctccgctgacatttcaggcgctgagccggaatgaagtgtatacagatacatttaatgaacaaaatccgaaggtgatttctcatattgatgccgctgactgggcggatttaattattgtcgcgcccgctacggcaaatatcatcggaaagcttgccaacggaattgctgacgatatgctcacaacgacggtgctggcggctgaggccccggtttgggtggcgcctgcgatgaatgtccatatgtatgatcatccggcggtgaaacggaacatctctgtgctttatcaggacggggtccgctttatcgagccgagtgaaggctatttggcatgcggatatgtcggcaaaggaaggctggaggagccggagcttattgttgagcgtgtcagagagcattttaaggagcctgaagacgaagcgccgctgaaaggaaaacatattgtcattacggccggtccgacgcgcgaagccgtggaccctgtccgcttcttcacaaataaatccaccggcaaaatgggctacgccgctgctgaagccgccgtccgtctcggggcgcgggtgacgctgatttcaggcccggtgtcaatagagccgccagtcgggctgtatcagtttcttcctgtgcaatcggcagccgatatgagagaagctgtgctttctgtgtttgattcatgcgacatggtgattaagacggcggccgtggccgattttacgccggcggctgtttctgatcacaaaatgaagaagaaagacggttcgctcgtgatcgaattcaaccgtacggcagacatactgaaagaactcggcgaacggaaaacacaccagctgctggtcggatttgcggctgaaacgcaagacgtcgaacactatgcgcgcagaaaactcgaacagaaaaaccttgatatgatcgttgcgaatgatgtgaaagcagaaggagccggatttggcacagatacgaatgtcgtcaccttctatttccgggacggaagaaaacgggagcttgcgcttatgtctaaacttgacgtttcctttgaaatgctgaaggaaatgaccgctttgaaagccgaggaccgaaaacccgtatgaatgtagcagaagtcattgtcgatgtcagctccaaaaacattgacagaccctttgattacaaaattcccgatcatttaaaagggatgatcgaagtcggcatgcgggtgattgtcccgtttggcccgcgcaagcttcaaggatttgtgaccggtttgaaagattcgtctgaattaaacggcggctcaatgaaggaagtcgagaagcttcttgatttgacgcccgttctgactgaggaactgatgcagctgtcttcatggctttctgacaaaacgctgtcgtttaaaatcacggcgcttcaggcaatgctgcccgccgcactgaaggcgaagtacgagaaagagctgaaagtcgttgacgaagaagcgctgacaccggacatcaaacagcttttcaggaatcacaaaagtcttctgtactcggatattaccgatgaaagcattctttcgtcacttcagaaattcgtgcgcaaaggaagcattgatgtcacatataaagtcgcccaaaaaacgaataaaaaaatgatccgcatgatcgaagcgggggcagacaaagaagaactcgcccggcacgcagattcattgacaaagcaggcttctaaacagctcgccgtgcttacttattttatcggcgggggagcaaagatttccgcggccgaactttgcaaaaagaccgattccagttcagcgacgctgaaaacgcttcttaaaaaggggcttcttacggaaagctttgaggaggtttaccgcgatccttatcaggacagaatgttcaaaaaaacagagccgctctctcttacagaagagcagcgggccgcttttgagccgattaaacaagctgtagccgaccatgtccatcacgtctttctgcttcacggcgtcacgggaagcggcaaaacggaaatttacctgcaatccattgaaaaagtgctggcaaaaggacaagaagccatcgtgctcgttccggaaatctcgttgacaccgcaaatggtcaaccgttttaaaggccgcttcggctcacaggttgcggtcatgcacagcggattatccacaggtgaaaaatacgatgaatggcggaagattcagcgcaaggaagtccggcttgtcgtcggagccagatcggccatctttgccccgtttgaaaatctcggcatgatcattattgatgaagagcacgaatcttcctataagcaggaggaaatgccgcggtatcatgcaaaggacgtagccatccgccgggccgagcatcacagttgtccggtcgtcctcgggagcgccacgccgacattggaatcatttgcgcgggcgaaaaaaggcgtttatgagctgcttccgttaaaacatcgcgtaaatcgccagctcatgcctgacgtttctctcgttgatatgagagaagaactgagaaacggcaacagatcaatgttttcaagagagctgatggaacagctggaagagaagcttgcaaaaaaagagcaggccgtcctttttctgaataaacgggggtattcctcgtttgtgatgtgccgggactgcggttatgtgccgcaatgtccgcattgcgacatttcaatgacttatcaccgctacggacaaaggctgaaatgccattattgcggccatgaggaacctgtcccgggaacatgcccggaatgcggcagcgaacatatccgctttttcggcacgggcacacagcgtgtggaggaggagcttaccaaagtgctgcctcaggcgcgcgtgatcaggatggatgtggacaccacttcaagaaaaggcgcccatgaaaaactgttgtcagcgttcggtgaagggaaggcggatatcctgctcggtacgcaaatgatcgcaaaagggcttgattttccgaacgtgacgctcgtcggagtattaagcgcagatacgacgcttcacatccctgatttcagggccgcggagaagacattccagctgctgacacaggtaagcggacgggccgggcggcatgaaaagccgggaacggtggtcattcaaacgtatacaccgtctcattacagcattcagctgacgaaaacgcacgactatgaaactttttttcagcaggaaatggcgcacagacgggcccagtcatacccgccttattattacgtggcgctggtgactgtttctcatgaagaagcgccaaaagccgcggtcaccgcagaaaagattacaaactatttaagagcgggatgcgggcctgatacgaaaattctcgggccggcggcttccccgatcgccaggatcaaagatagatatcgctatcaatgcgtgataaaatacagacaggaaaacgagttgcagattcagttgaaaaagatactggagcactataaacgcgacattgcgcaaaagcatgtaatgatttcaatcgatatgaatccgtacatgctgatgtaacattagtttttggagggcaaaattttggctgtgaaaaaaatcgtcacacacccggcggaagttctggaaacacctgccgatgaagtgacagtgtttgataaaaaattaaaaaaactgcttgacgatatgtacgatacgatgcttgaaatggatggcgtcggccttgccgcgccgcaaatcggcattttaaaaagagcggccgtcgtggacatcggtgaagaaagcggccggatcgaccttgtaaatccggttattcttgaaaagagcggtgaacagaccggagtcgagggctgcttaagctttccaggggtttacggcgatgtcacccgcccggattacgtaaaggtaaaagcccacgatcgtaaaggaaaaccgtttattttagaagcggagggttttttggccagagccgttcagcatgaaatggatcatttagacggcattttattcacatcaaaaattacggcttactacactgaagaagaactggcagaaatggaaggatgattggatgacaaggatcgtttttatgggaacgcccgacttttcagttcccgtcctgcgcacgcttattgaagacgggtatgaagtggttggtgtcgttacgcagcctgaccgcccgaaaggcagaaaaaaaatcatgacgccccctcctgtaaaggctgaagctgaacgtcacggcattcccgtgcttcagcccgaaaaagtaaggctcgaagaagaaatagaaaaagtgctcagcctgaagccggacctgattgttacggcggcattcggacagatcctgcccaagcagctgctggacggcccgaaatacggctgtatcaacgtacacgcgtcactattgcctgaattaagaggcggagcgccgatacattattcgattctccaaggcaagaagaaaacgggcgtgacgatcatgtatatggttgaaaagcttgatgcgggcgatatgatttctaaaatcgaagtggaaattgatgaagcggataacgtcggcacgctacacgacaaattaagcatagcgggggcaaagcttttgtcagagaccgtcccgaacgtcatttccggaaatattaaaccgatcaaacaggacgaatcaaaagcgacttacgcgcctaacattaagcgtgagcaggagcggattgattgggcaaagcccggagaagagatttacaaccagatcagaggtttaaacccttggcctgtcgcctatacaactttgaacggtcaaaatattaaagtatgggcttctgaaaaagttgcggcaaaaactgaagctgcgcccggaacagtcatccgcacggagcacaacggcattgtcgtcgcagcaggaaacagcaccgcccttttaatcacagagctgcagccggcgggaaaaaaacggatgaagggcgaagattttgtaaggggcaaaaatgtgcagcccggtgacgtgttaggagaagcaaatgaagaaaattaatgtccgggagctcgctcttgaagcgcttgagaagcttgagcaaaatcaggcatacagcaacctgcttcttacatcggttatcaaaacgaacacgctcagcgatcaggacagaggactcctgacagagcttgtctacggaacgctgcaaaataaaatcgccttagactatatgctgaagccttttatccgcaagccgaataaggtgaagccgtgggtgattcagctgcttcgtctgtccgcatatcaaatggagtatttagaaaaaataccggatcgcgccgccattcatgaagcggttgagatcgccaaaaaacgcgggcataagggcattgcgtcctttgtcaacggcatcctccgctccctgcagcgtgaaggggcgccgtcattcgctgaaattgaagacccggttctccgtctttctacagagacaagccatcccgaatggctcgtaaaagagtgggtcgaggcgtacggctttgaggcggctgaaaagatctgccggattcatctcattccgccgaagcagacgctccgtgtcaatcacataaagagcgacagggaaacggtgctgaatgagatggagaatgccggtctggaagcggaagccggagacctttctcctgatgcgattaagcttttaaaaggaagcatcgcgaacacggcatttttccaaaacggccgggtatccatacaggatgaaagctcaatgcttgtcgcgcgggcgctggacccgaagccgggcgaaaccgttttagacgcatgcgccgcaccgggcggaaagtcggctcacattgcggaactgatggagaacgaggggagcctcacatcgcttgatcttcaccgccataaagtgaagctgattaaagaaggcgcagaacggctcgggcttacgatcatcgacgcgcaaacgatggatgcgcgaaaagcgggagaggcctttggcgcagaacggtttgaccgtattctcgttgatgccccttgctcaggtttcggcgtcatcagaagaaaacccgatatgaaatatacgaagacgccggaggacagcagacggctgtcagaaatccagctcggcattttaagggaaatcgccccattagtaaaaaaaggtggcacactcgtatacagtacgtgtacaatggaccggacagaaaatgaagaagttatgcatgcgtttatacaagaacaccctgagtttgaacccgatttgtctcttgaaaagcggctgcctgaaaaggcgagaccctttgttcaggatggaagccttcaaattcttccgcattatttcggaacagacggtttctttattagcagcatgagaaagaagggataaaaaatgacacaattaaaaaagacaagcgtacggaaagagctgcggactgagcagccgtccatttactcttttgaattagatgaaatcaaacaatggctgactgagaatggcgaaaagccgttccgcgcggcacagatttttgaatggctctatgaaaagcgggtttcttcatttgatgaaatgacaaacctctcaaaaagcctgcgtgaaaaactcgagagcaattttgtgctgacaacgctgaaaacggctgtaaaacagacatctcaagacggcacgatgaaatttttatttgagcttcatgacggttatacgatcgaaacggttttaatgagacacgagtatggtaattctgtatgtgtaacgacacaggtcggctgccggatcggctgcacattttgcgcgtcaacgctcggcggactgaaacggaatcttgaagcgggagaaatcgtcgctcaagtcgtgaaagtacaaaaggcgcttgatgaaacggatgaacgcgtcagctcagtcgtcatcatgggaatcggagagccgtttgataatttcaatgaaatgctcgctttcttaaaaatcattaaccacgataaaggcctgaacatcggagcgcgtcatatcacagtttccaccagcggaatcattccgaagatttacgatttcgccgatcaaaaaatgcagatcaatttcgcgatttctctgcatgctccgaatacggaaatcagaagccgtctgatgccgattaacaaagcctataagcttcctgaccttatggaggctgtcaaatattacatcgagaaaacaggcagacggatcagctttgaatacgggctgttcggcggcgtaaatgatcaggtcgaacatgcagaagagcttgcagaactgttaaaagacgtgaaatgccatgtcaatttaattccggtaaactatgtgcctgaacgggattatgtccgcacaccgagagatcagattttcgcatttgaaaaaacgttaaaatcccgcggtgtaaatgtcacgatcagaagagagcaaggccatgacattgacgcggcctgcggtcagcttcgcgcgaaggagcgtcaagacgagacgaggtgaagaggttgattacagccttgaaaacagatacaggtaaagtccgccggcataatgaagatgcggcgggcattttcacaaaagaagacgcggtgcttgcggttgtcgccgacggcatgggcggtcatcttgccggagatgtagcgagcaggatggcggttgcggcgatggaagagcagtggaaccggaccgaaacggttccttctctgccgtctgcttgcgaggattggctgaaagaccggattcatgaggcgaatctcaaagtacatgaccacgctaaagcgaatgaagaatgccggggaatgggcaccactgttgtttgcgccttattcaccgggaagtttgtcactgtggctcatatcggagacagccggtgctacctgcttcaagagggggatttcactcagctgactgaagaccattcgcttgtgaatgagctggtcaagacgggagaaatttcgaaagaggacgccgagcaccatccgcggaaaaatgtattgacgagagcgctggggacagatgaaaccatcagtcccgacgcccgttcttttgaactgtctgacggcgatcagctgcttttatgctctgacggactgtcaaataaaatagaagatcacgagatcaaacaaatgcttcaagccgaatctgatcctcaggaaaaagtcgaccttctcatcagcaaagcgaatcaaaacggcggcgaagataacatcacggctgtgttgattgagttttccgcagatgcaaaagagggtgaagacaagtgctaaccggcaagcggatcagcgggcgttatcatatcctccggcccattggcggcggcggaatggcaaacgtttttttagctgaggacatcattctcgaacgtgaagtcgcaattaaaattctgcggtttgactttgtgaatgacattgattttatcaggcgtttcagaagagaagcacagtcggcatcaagcctcgatcatccgaatatcgtcagtatttacgatatcggggaggaaggcgatatttattacattgtcatggaatatgtggaaggcatgacattaaaggaatacataaacgcacacgggccgctccatccgaaagaagcgctgtccattatggagcagatcgtctcggccatcgcccatgcccatcaaaaccatatcgtgcaccgggatattaaaccgcacaatatattgatagatcatttagggcatatcaaggtgacggatttcggcatcgccacagcgcttacgtctacgacaatcacacatacgaattctgtgctgggctcggttcattatttgtctccggagcaggcgagaggcggtctggcaacgaaaaaatcagatatttacgcgctcggcatcgtgctgtttgagcttttaacaggtaaaattccttttgacggagaatcagccgtcagcatagcgctaaagcatctgcaaacagaaacgccttccgccagaaagtggaacccctccattccgcagagcgttgaaaacattattttaaaggcaaccgctaaagacccgtttcaccgctatgaaagcgccgaggacatggaagcggacatcagaacggcttttgacgccggcaggctgaatgaacaaaaattttccgtgcaggatgatgaggaaatgacaaaagccattcccgttattactgacggcgcaaaagccgcgcctcaggcggaaacgccgggggagacggacgataaggaacagcagcccgccaaaaagaaaaaacggaaatggccgtgggttttgctggccgtctgtttcattttcattatggcggctgttcttgcggtcaccgtgtttccgtctttatttatgcctaaagatgtaagcgtccccgacgtacggggcatgaagtacgaaaaagcggaagccctgcttgaaaagaatgggctccgggcggatcctgatataacggacattgaagatgaaaaaatagaagaggaattaatggtcaaaacggacccaaaagcggggtctaccgttaaagaaggctcttctgtaaaactgtacaaaagcatcggaaaaccgaaaacccagctgattgacgtgaaagggcggcagatcggcgacgcaaaaaaagcgctgaaggaaaaaggcttcaaacatgtcaatgtcaaagaagagaacgatgacagcgaggccggcaccgtaattgatcagaacccgtcagccggcaccgacatggtcgcaagcgacgatgaagtcaatctaacggtcagccttggcccggcggacgttacgctgagggacttaaagacttacagcaaagaagcggcttcagggtatcttgaagataacggcctgcagcttgttgaaaaacaagcccattcagatgacgtaccggaaggacaagtcatgaaacaagagccgtcagccggtactgcggttaagccgggaagtaatgttgaagtgacgttctcgctcggacctgaagaaaaaccggcgaaaacggtaaaagaaaaaatcagcattccttacgaacccgaacatgaaggggacgagcttgaagtgcaaatcgccattgatgataaggaccacagcatctctgatacgtatgactcatttaaaataaaagagccgactgaaaaaacaattgaactgaaaattgatcagggacagaaggggtattatcaagtgatggtcgatcataaagtcgtcagctacaaaacgattgaatacccgaaagataatgactgacaaggagggaccctatgcctgagggcaaaattataaaagcgttaagcggattctattatgtcttagatgaatcacaggacaagatcattcaatgcaggggccggggcattttcagaaaaaataaaataacgcccctggtcggcgattatgccgtttatcaggctgaaaatgataaagaaggctacctgctggaaatcaaagaacgaacaaacgagctgatcaggccgccgatttcaaatgtcgatcaggccgttcttgtcttttctgccgttcagccggcgttcagcacgtctttattggaccgttttctcgtccttgtggaagccaacggcattcacccgatcatctgcataaccaaaatggacttagctgcagacggggaatcgaaagaggcgatactttcttacgtgaaagactatcaggcaatcggttatgacgtatatgtgacgtcatcaaaagaaaacagcggtttaacaggcattgtgaaacacttcgagaacaaaacaacggtgtttgccggtcagtcgggagtcggaaaatcttcgcttttaaatgcgatcagcccggagcttgagctgaaaacaaacgagatttccgcacatttgggacgcggaaaacatacgacgcgccatgtggagctcattcatacatcaggcggtctggtggcggatactccggggttcagttcgcttgaatttaccggcattgaggaagaagagctgggcagcacgttccctgagatcagagaaataagcgcctcttgcaaattcagaggctgtctgcatcttaaggagccgaaatgcgcggtaaagcaagcggtggaagaaggagagattcagccgtaccgctatgagcattacaaagaatttatgcaggaaataaaagagagaaagccgaggtattaatatgattaaggttgcgccatcaattctttccgccgattttgcttcactgggcgaggaaattaaagacgtggaaaaaggaggggcggactatatccatattgatgtcatggatggccatttcgttcctaacattacaatcgggccgcttatcgttgaagccgtccgtccggtgactgatctgccgctggatgtccatcttatgattgaaaatccggaccgctacatcccggcattcgcaaaagccggtgcggacatcctttccgttcatgctgaagcgtgtccgcatcttcaccggaccattcaattgataaaagagcagggggtaaaagcgggagttgtgctcaatccgcatacgcccgtccacatgattgaacatgtgatcgaggagcttgaccttgtgctgttaatgacggttaaccccggttttggcggacagcgcttcattcattcggttctgccgaaaatccgtcaggtcaaacagctggctgaggagaaaggcctgtctgagcttttaatcgaggtggacggaggcgttaataaagaaacagcccctttatgcgctgaagcgggcgctaatctgcttgttgccggatctgccgtatataatcagccggatcggaaaaaagccatcgctgacatccgaaacgcgtaataaacatgctgaaaaagagcccggtgaaagccgccggctcttttcgcgtctaagagagaggaaaacatatgaagacaatcaatattgttgcgggcggcccgcgggagcttattcccgatctatccgaatacacagacggagatacgacatgggtcggagtcgataaagggacggttgctcttttggaggccggaatcattccgcaggaagctttcggtgattttgacagcattacggaagaggagctcatgcagattcaaaaagcggcgccggccctccatgtatatcaggcggaaaaagattataccgatcttgaactcgcccttgactgggctttgcaactagaaccgaagaccattcggatattcggtgtgacgggcggaagagccgatcactttttagggaacatccagctgctgtataaagctttacataagaataccgatgtcgagctgatcgaccggcagaatgacattcagatgttcgggcccggccgttatacaattgaagaaaaagcaagcagacgctatatttctttcattccgtttacggaagcggcagacggcctgacgctcgacggttttaaatatccccttgataattgtcatattcctctgggttccacactatgtattagtaacgaactcattcattcacgaggtactttttcgtttgcaaaaggcatattaataatggtaaggagcgcggattagaaaagcggcttctgccatatgcggaaaaaaccatgaatcctaaagtgatgaacgcagcggatacgggacttataggaggggacaaaatgaaattttataccattaaattgccgaagtttttaggaggaattgtccgggcgatgctgggctcatttagaaaagagtaagcccaagaagctgaaattgccctctttgaacgcataaaaaacgcctgccgcataaaagggcaggcgttcatttttgcttatacacgctcaactttaccggattttaaagcccgggcagatacatacacttttttaggtttgccgtcaacgaggatgcggaccttttgaaggttggcgccccaagtacgcttagaagcgttcattgcgtgagaacggttgtttccggcttttgtttttttacctgtaataaaacatttacgtgccatttgtttccctcctaactgcgcgaaacatctttttaaacatagtgtctcagatgctttcgttatacaatactttaaataatttaccacagctaaaaaccgtttgcaactattgtttcccttactttcaagaaaaatcacttgacatgtaaaaccaatcacatttccgcgctgaaggccgctgtctgtatcttttcttttcataatgggatacatatagtagaataatgataactctatgcacctgaaggaggaacctgtgtgtccattgaaatgaagacaaaatacggacagattgatatatccaacgaagtcatcgcaatggttgccggaggcgctgccattgattgttacggaatagtggggatggcctcaaaaaaccagattaaagacggtttgtctgaaatcctccggagagagaacttcgcaaaaggcgtacatgtccgtcaggaagccgaacaaatacatatcgacatgtacattattgtcagctacggcactaaaatatccgaagtagcccacaatgttcagacgaaggtaaaatacacagtaaatcaaacaatcggacttgcagttgattctgtaaatatttatgtccaaggcgtacgagtaacgaacccgtagtgaggaggatgagtattgtctagacgaaacttagatgggagagcttttgcgacaatgattctggcgggggctgagacattgtctcaaaacgcatccgcggtggatgcgctgaacgtgtttcccgtgcctgacggcgataccggaacaaatatgaatttatcgatgtcatccggtgcaagagaggtagagcacattgactcacccgacatcggcaaagtcggcatcgccctgtcaaaaggcctgcttatgggggcgagaggaaactcaggggtgatcttgtcccaattgttcagaggtttcacaaagagcattgaaaacaaaaaccaaatagacgcccaagaatttgccgcagcactccaagcgggagtggatatggcatataaggcggtcatgaaaccggttgaaggaacgattttaaccgtggccaaggatgcggctaaaaaagcggtcgcctcggctaaagaagaaaccgatatcattgctctcatggaggccgttattgaagaagcggaagcgtcgctgaaccgcacgccggatctgcttcctgttttaaaggacgtcggtgtcgttgacagcggcggaaaaggtctgctttgtgtatatgaaggctttttgtctgctttaaaaggagaggccgtaccgaaaaaagcggttcttccggcactcgatgatatggtgaatgccgagcatcataaaagtgcgcagagcatgctgagtacagaagatattgaattcggattttgtacggaagtgatggtaaggctggatcaagataaacggacgttcaaggaagagacgttcagaaacgaactgagccgtttcggcgattcattgctggtcgtggctgatgatacgctggcgaaagtccatattcatgccgaagaaccagggaacgtactcaatctcgcacagcgttacggcgatttgattaaaattaaaattgaaaacatgagggaacagcatacttcaatcatcagccaagaacatgatgaaaaaaagccggccggcgttatgaaagaagcccggaagccttttggcatcgtgactgtggcaatgggagagggcatttctgaattgtttacgagcatcggcgcttcacacgtaatcgaaggcggccagacaatgaatccgagcacggaagatattgttgaagccgttcagtctgtcaatgcggagacggttttcattcttccgaacaattccaatattgtgatggctgccaatcaggcggcgagcgtggctgaagaaaatgtcattgtcattccggcaaaaacggtccctcaaggcatgaccgccctgcttgcgtttaaccctgaccagccggctgatgtaaatgaagccaatatgcttgaggccatccggaatgtgaaaagcggacaggtgacatattcagtcagagacacccatattgacggcaaagatattaaaaaaggtgattttatcggcattttaaacagttcaattatcggcagcgccgaagatcggatgagtgcggcgaaattgctgctggatgaaatgatcggggaagaagatgaaatcgtcaccatcctgtacggagaggacgcgccggaagaagaagctgagaaacttgctgagtatattgcaagcgtctgtgaagatatcgaggttgaaatccataacggcagacagcctctgtatccatatatatttgcggcagaatagaagggcttatcaggcccttctattcttatgcctttatttacctgcggcagtgcggcagtgtgcctgcttgccaattgagaaatgttcaattagtctaaagaaaagcgctgaatagagtgatgttaaggaggaacaaaccagcatgaagtatagaagcgtttttgatattatcggcccggtaatgatcggtccgtccagttcacataccgcaggcgccgcccggatcggcagagtggccagaagcctattcaggcgggagccccgccggatcgttgtgtctttttacggatcatttgcggagacgtataaaggccacggcactgatgtcgcgattatcggcggcctgcttgattttgatacatttgatgaacggattaaaacagcgattcaaattgcggaagagaagggcatatatgtagagttccgtacagaggatgccgtgcccgttcatccgaatacggcgcgtatcgtcatttctgatgatgagggagagcttgcccttaccggtatttccatcggcggcggaaaaatagaaatcacggagctcaacggctttgagctgcgtctttccggaaaccatccggctattttagtcgttcacaatgataaattcggcacgattgcaggcgttgccaatgtgcttgcgaaattctccatcaacgtcggacatatggaagtggcgcgtaaggacgtcggccagcttgcgctgatgacgattgaggtcgatcagaatattgaagaagaagtgcttgacgagctttcaacacttcctaatattatacaggttactaagatagctgactaaaaagtcaggaggaaaatgacatgtttcgtaatgtgaaagaattaatagaaatcactcaagaaaaacaaattccgatttcggaagtgatgatcacccaagagatggaagtaacgcaaaaaacgcgggaagaaatctttcaaggaatggagcgcaatctctccgtcatggaagcagctgttgaaaaagggctgaagggcgtcacgagtcagaccggtttaacaggcggagatgccgtgaaacttcaggcatacatccaatcgggaagaagcctgtcaggcaatctgattttagacgccgtttctaaagctgtcgcgacaaatgaagtcaatgcggccatgggaacgatctgcgctacaccgaccgccggctctgccggggttgtgccgggaacgttattcgccgtaaagcataagctgaaccctacgacagaacaaatgatccgttttctgtttacagccggcgcgttcggttttgtcgtagcaaacaatgcgagtatttcaggagcggcaggaggctgtcaggcggaagtcgggtcagcatcaggcatggcagcggctgcgattgtggaaatggcgggcggaacgcctcagcaatcagcggaagcaatggcgattacactgaaaaatatgctcggtctcgtatgtgacccggtcgccggattggtagaagtgccgtgtgtcaaacgaaatgcaatgggagcatcaaacgcaatgatcgcggcggatatggcgctggccgggattacaagccgcattccttgcgatgaggtgattgacgcgatgtacaaaatcggccagacaatgccgacagcactgcgtgaaacgggacgaggcggtttagccgcgacaccgacgggaagagaattagagaaaaaaattttcggaggagcgctgaaatcaagtgacacaccatcagcaaactagtatagcggagattaagggcattgggccggaaacagaaaagacattgcacgaacttggtatctatgacatttctgatcttctgaattatttcccttaccgttatgacgactatgagctgagggacttagaagaagtaaaacatgaagaaagagtgacggtagaagggaaggttcattcagaaccttctcttacctattacggcaaaaaacgaaacaggctgacattcagggtgcttgtcggcaattatttaattaccgcggtctgctttaaccgtccctacttaaaaaagaaactgacgttaggttctgtcgtcacgatatccgggaaatgggataaacacagacagaccgtttccgtgcaggaattaaaaaacggtcctcatcaagaagataaaagcattgagcctgtttattccgttaaagaaaacgtcaccgtaaaaatgatgagacggtttattaaggaagcgctggagcatcatttggacagtgcggccgatccgcttcctgaaaaattgagaatccgctacaagctgcctgattacaaacatgccctgcagacgatgcatcagcctgaaacgagggaatcgttacagcaggcaagacgccggtttgtttacgaggaattcttattatttcagctgaaaatgcaggcgttccgtaaagcggaaagggaacagtcaaaaggcatcagccatgtgtttcctgctgaaaagctcgccgctttcacagacagcctgccgttttcgctcacaaccgcacagacgcgcgtgcttcgggaaattaccgctgatatgacatctccttaccgaatgaaccgtctgctgcaaggtgatgtcggttcagggaaaacggccgtcgccgccatcgctttgtacgctgcgattctgtcggggtatcagggggcattaatggtgccgactgaaattctggccgaacagcatgcagattctctcgtatcgttgtttgcaaatgaagatgtaaatatcgcgcttttgacgagttctgtaaaaggaaagcggcgcagggagcttttggagcggcttgctctcggagagattgatattttagtaggtacccatgctttaatccaggacgaagtggaatttaaagcgctgagccttgtcattacggacgagcagcacaggttcggagtcgaacagcgcaaaaaactcaaaaataaaggccaggatccggatgtgctgtttatgacagccaccccgattccgagaacgttggccattaccgtcttcggagaaatggatgtttccgtgatagatgaaatgcccgcggggcgaaaacaaatcgaaacgtattgggtgaaacacgacatgctggagcggattttggcttttatagaaaaagagctgaaacagggaaggcaagcctatattatctgcccgctcattgaagagtcggataaactggatgtacagaatgcgattgatgtatataacatgctgtctgacgtctaccgcgggaaatggaatgtcggcctgatgcacgggaagctccattctgatgaaaaagatcaggtgatgagagaattcagcgccaatcaatgtcaggtacttgtgtcaacaaccgtcgtagaagtcggggtgaacgtgccgaatgcgacgattatggtcatctatgacgccgaccgtttcggattatctcagctccaccagctccgcggccgggtcgggcggggagaccaccaatctttctgcatcttgatggcagatccgaaatccgaaaccgggaaggaacggatgagaatcatgtcggagacaaacgacggcttcgagctgtctgaaaaggaccttgaactgcgcggccccggggatttcttcggaaaaaaacagagcggtatgcccgagttcaaggtggcggatatggttcatgactacagagctttggagacggcccgccaggatgcggccaatctggtgtcttcagaggctttttggaaagatgacgaataccgcatgctgcgcggtcaattactttcaagcggcgtcctggaaggggagaaattaagctgattctgtaaaattcggcggctttcaaaaaacaatcattgcattccaatctatgagattatatactactattagtacctagtcttaattgtccggatggtgtttacagatgagaagaagcaaaaaagaacgccaaaaattattgcagcagacgatcaaatcgacacccttcatcacagatgaagaattagcggggaaattcggcgtcagcattcagacgatccgtttagaccgcttagagctctcaataccggagctgagggaaagaattaaaaacgtggcagaacaaacgcttgatgatgaagtgaaatcactgtctttagacgaagtgatcggtgaaattattgatctggagcttgacggccaggccatttccatattagaagtaagacgcgaacatgtcttcagccgcaatcaaattgcgcgggggcatcatttgtttgcgcaggcgaactcactcgccgtagccgtcattgatgatgagctggcgctgaccgcaagcgcaaatatccgctttacaagacaggtgaaagaaggcgagcgcgtcgttgcgaaagccaaagtgacggcagtcgaaaaagaaaaaggcagaacggtagttgaagtcaacagctatgtgggagaagaagtcgtgttctccggcagctttgacatgtaccgttcaaaacaatcataaaggtggagcatgcatgagaatagctgtagatgcaatgggaggcgacaacgcacccaaagctgttattgacggagtaatgaagagtattgaggcatttgacgatctccatattacgctggtcggtgacaagacaacgatagaatcacacttgccaacaacatcagaccgcatcactgtgttgcacgccgatgaagtgattgaaccgacggatgaaccggtccgcgccgtacgcagaaagaaaaactcttctatggtgctgatggcgcaggaagtggctgaaaacagagcggacgcctgcatctcagcggggaatacgggcgcactcatgacagcgggactgtttatcgtcggcagaattaaaggaatcgaccggcctgcgcttgcgccgacgcttccgaccgtttcaggcgacggtttccttcttttggacgtgggagccaatgtcgatgccaaaccggagcatctcgtccagtacggaattatgggatctgtatatgcccggcaggttctcggaatcagctcgccccgcgtcggcttgttaaatgtcggcacggaagaaaagaagggaaacgacctgacaaaaaagacgtttgaattattaaaagaaacaaacgtgaattttgtcggaaacgtagaggcgagagacttgctcgaaggcgctgctgacgttatcgtcacagacggctttacgggcaacgtcacgttgaaaacattggaaggttcagcgttatcgattttcaaaatgctgaaagatacactgacttcaagttttgtttctaagctcgcagcgggagtgctgaagccgaagctgatggaaatgaaattgaaaatggactattctgagtacggcggggcgagtcttttcggtttgaaagcgcccgtcgttaaagcgcacggctcttctgacgcacgcgctgtttaccatgcgctgcgccaggcgagagaaatggtcagccaaaacgtggccgcatttatagaagaagaagtaaaagaagaaaaaacagatgagtagtctggaggttaccgcatcatgagtaagattgcatttttatttcccggacagggatcacaatatatcggtatgggaaaagacctgtacgaacgcgaagaagcgtcaaaacgtatttttgatgaagcggatgaaacgcttgaaacaaagctgagctcactcatttttgaaggtgacgccgaagaattgacccttacatacaatgcgcagcccgcgctgttgacaacaagcatcgccgtattggaaaagtttaaagaatccggcatcacccctgatttcaccgctggccacagcctcggagaatattcggcgcttgttgcggcgggagcgatgacatttaaagatgccgtttacacggtaagaaaacggggagaatttatgaatgaagccgtgccggccggagaaggcgccatggcagctattctcggaatggatgcggagtccttgaaaaaggtgacggatcaagtgacggaaaacggtcatctcgtacagcttgcaaacctgaactgccccggccagatcgtcatttccggaacggcaaaaggcgtggagctggcttcagaagaagcgaaaaacaacggagccaaacgggcaatcccattagaagtaagcggaccgttccattctgaattaatgaagccggcagcgcaaaaactcgaggaggtgctcagcgcctgtgagttaaaaaatgcggctgttcccgtgatttcaaacgtttcggctgacgttatgacagaaaaagacgatatcaagaaaaaattgatcgaacagctgtactcacctgtgcgctttgaagaaaccattaacaaactgattgacgaaggtgtcacgacgtttgttgaaatcgggcccggaaaagtgctttcaggccttgtgaaaaaagtgaaccgccgccttaaaacaatctcggtttctgaccatgaaaccatcgaactggcgattcaaacgctgaaggaggagaatcaggatgcttaatgaaaaaacagcagtggtaacgggagcgtcccgcggaatcgggcgggcgatcgcgcttgatcttgcgaaaaacggctgtaacgtagtagtcaactactccgggaatgaagcgaaagcgaacgaagtcgtagatgaaatcaaatctttgggccaaaacgcgatcgcggtaaaagccgatgtatcaaattccgaagaagtacaaaacatgatgaaagaggctgtcgctgcattttcttcaatcgacattctcgtgaacaatgcggggattacaaaagacaatcttctgatgagaatgaaagaaaatgaatgggatgatgtcattaacattaacctgaaaggtgtattcaactgcacgaaagccgtgacaagacagatgatgaaacagcgctccggccggattatcaacgtatcatcaatcgtcggcgtcagcggaaaccctgggcaggcgaactatgtggcggcaaaagccggtgtaatcggcttaacgaagtcatcagccaaagagcttgcgagccgaaatattacggtcaatgccattgctccgggctttatttctacagatatgacggacaagctttctaaagaagtccaagatgaaatgctgaagcagattccgctcgcgcgtttcggtgatccttccgatatcagcagcgttgttacgttccttgcttctgaaggatcgcgttatatgacgggccaaacccttcatattgacggcggaatggtgatgtaaagatttgtttttaaaatttcatcctagtttctctagttttttaaaaacgaatcctctataatacttgaggggaggtgaattgctatggcagatacattagagcgtgtaacgaaaatcatcgtagaccgccttggcgttgatgaagctgacgtcaaacttgaagcttctttcaaggaagacttaggtgctgattccctagatgtagttgagcttgttatggaacttgaagacgagtttgatatggagatttctgacgaagatgctgaaaagattgcaacagtcggcgacgctgtgaactacatacaaaaccagcaataagctgatgctaaaagtcccgcctgacagcggggctttagccctttaatcgttcggttaccggcgtctgacgctgtacgcgctgccgattccgtttacggcggggagcgcggtgaacctgatgtgcctatggaggttactatgtcaaaacactcacattttaaagataaaaaaaagttctataaaaaaatagagcaatttaaagagttccaagaacggatttcggttcattttcaaaacgagaaacttttgtatcaagcatttacacattcatcttatgtgaatgagcatcggaaaaagccgtatgaagacaatgaaaggcttgaatttttaggtgacgctgttttggaactgacgatctcccaattcttatttgccaaatatccggccatgagtgaaggagatttgacgaagctgagagccgctatcgtatgcgagccgtcactcgtctcacttgcccatgaattgtcattcggcgatcttgttctcttgggaaaaggagaagaaatgacgggcggcagaaagcgtcctgcgcttttagcggatgtgtttgaagcgtttatcggcgcactgtatctggatcagggccttgagccggttcagcaattcctgaaagtgtacgtgttccctaaaataaacgatggtgctttttctcatgtgatggatttcaaaagccagcttcaagaatttgtacagcgggacggaaaaggatcgcttgagtacaaaattctcaatgaaaaagggcctgcccacaaccgggaattcgaggcgcttgtctctcttaaaggtgaggcgctcggtatcgggaacggacgttccaaaaaagaagccgagcagcatgcggcacaggaagctcttgcaaaaatgcaaaaacatcatacgaaacaataaaatccccctgtttccctagggggatttcagtatgtctgcgcctgatataagcgggtgattatgataatattgagatacttatacgataaggaggatctgggatgttcctcaaacgtttagacgttataggatttaaatcatttgcagaacggatatccgttgactttgtaaaaggcgtcacggccgttgtcggtccgaacggcagcggaaagagcaacattaccgaagccatccgctgggtgctcggcgaacaatcagcccgctcgcttcggggcggaaaaatggaagatatcatttttgcgggaagtgattcgcgcaagcggctgaaccttgccgaagtcacgttaacgcttgataatgaagatcattttctcccgatcgattaccacgaagtcagcgtgacgagacgggtgtatcgttccggagaaagtgaatttctcatcaacaatcagcagtgccgcctgaaagatatcattgacttatttatggactccgggctcgggaaagaagcattctctattatcagccaggggaaagtcgaagagattctcagcagcaaagcggaagaccgccgcagtatttttgaagaagcggccggcgtgctgaaatataaaacaagaaagaaaaaagcggaaaacaaactgtttgagacgcaggataacttaaacagggtggaagatattctccacgagcttgaagatcaggtcgaaccgctgaaaatccaggcatcaatcgccaaagactacttagaaaaaaagaaagagcttgagcatgtcgaaatcgcccttaccgcctttgacatcgaagaactgcacggcagatggtcgggtttaaaagacaaggtgcaggctgctaaagaagaagaattggcggaatcatcggctctatccgcaaaagaagcgatgatagaagagacgagagataaaatccacgcgcttgatgaatccgtcaacgaactgcagcaggttctgctcgtgacaagtgaagagctggaaaagctggaaggccggaaagaagtgctgaaagagcgcaaaaaaaacgccgcgcaaaaccgggaacagcttgaggaatccgttacacattacacgaacaaagaagccgaactgaaagcggacattgaaaaacagtctgccgtctatgataagctgcgtgcggaagtgaagcagttaaacgcccaggtgaaagaaaagcagcaggctctcagtctgcataatgaaaatgtagaagacaaaattgaacaattaaaaagcgattactttgaattgttaaacagccaggcgtcgattcgcaacgagctgcagcttttagatgaccagatgtcccaatctgcggtccagcaggcgagactgaccgcaaacaacgaaaaatatcttgaagaacgtaacgatattgcagtccgcaaagcggcgtgcgaagaagaattggccgccgttgaagaggatattcacaatcaggtcgtccgctttcgcgaagtccagacagcatatgaacagaaaaaacgccaatatgaaaagaaagaatctgcgctgtatcaggcgtatcaattcgtccagcaggccagatccaaaaaagatatgcttgaaacgatgcaaggcgatttttcaggattttaccaaggcgtaaaagaagtgctgaagcagaaagagcagcttggcggcatccgcggcgccgttctcgaactgattgccaccgaacaaaaatatgaaacggcgatcgagattgcactcggcgcagcggcgcagcacgttgtcacagacgacgagcaggcggcgcggaaagcgattcaatatttaaaacagaattcattcggccgcgcgacgttcctgccgcttacggttatgaaaccgcgccagctccaaacccgtgatgaacagacggcttcaaagcatccatctttcctcggcacagcgagcgggcttgtcacatatgatgccgcgtatcggaatgtcattcaaaaccttctcggcaccgtgctgatcactgaagatttaaaaggcgcgaatgaactggccaagcttctcgggcaccgctaccgcatcgtgacgcttgagggtgatgtcgtcaatccaggcggatcaatgacaggcggcgcggtcaaaaagaaaaacaattctctgctcggcagaagccgtgagcttgagacggtgactgcgcggcttgccgaaatggaagaaaaaacagctctgcttgaaaaagaggtcaaaacgctgaagcaggccattcaagagcttgaacatacgctgagcggtctccgtgaagacggtgaagctttcagaacaaagcagcaggatgtaaaaggcaggctgtatgaactcgaagtcgctgaaaagaacatcaatacccatctggagctttacgatcaggagaaagcatcgctgacggaaagcagccgggaaaaagagacgcgcaaatcagctctggaagaacagctgagtgaggcatccggccagctgaaagagcttgaggaagagatggaaaggctgacaaaacaaaagcagaccctatcctcaacgaaagaaacgctctctcatgaactgacggaatgtaaagtggccgctgcgaaaaaagaacaggcgtgctcgagtgaggaagacaacctcaaaagactgaaaaaagagcttgaagaaacgcagctcgctctgaaagaaacacgggaagatttaagcctcctgacctcagagatgacgtccagcacaagcggtgaggagcagcttgaagaagcagcccatcacaagcttcacgataaaacgagaacgatcgaattgatcgccagccggcgcgaccagcgtgtgaagcttcagagggcgcttgatacgaacgagcttgagctgaaagagatgaagcgtctgtacaagcaaaaaacggacattctgaaagatgaagaggtaaaactcggccggatggaagtcgagcttgataatctcttgcagtatttacgcgaggagtacagcttatcctttgaaggggcaaaagaacaatatcagctcgaactcgagcctgaagaggcgagaaaacgggtcaaactgatcaagctttcaattgaagagctcggaacggtcaatctcggcagcatcgatgaatttgaaagagtaaacgaacggtatcagtttttaacagagcagaaaaatgacctgacggaagcgaaaaacacactgtttcaagtcattgaagaaatggattctgaaatgacgaagcgattccatgaaacgtttgtccagatccgttctcaattcaacgacgtgttccgttctttattcggaggaggacgggctgaactgaagctgactgatccgaatgatcttcttaattccggggtggacattatcgcgcagcctccgggcaaaaaactgcaaaacttaaatcttttgtcagggggagaacgggcgctgactgccattgcccttttattctccattctgaaagtaaggcccgtgccgttctgcgtccttgatgaagtggaagctgcgcttgatgaagccaatgtattcaggtttgcgcaatatttaaaaaaatacagcggcgacagccagtttatcgtcatcacccacagaaaaggcactatggaagaagcggatgtcctctacggtgttacgatgcaggaatccggcgtttcccgaatggtttcggtcaaactggaagaaacaaaagaattcgttcagtaacgaggaaagaggttgaaagatgagcttttttaaaaaattaaaagagaaaatcacgaaacagacagactccgtctctgaaaaatttaaagatggtcttgaaaaaacaagaaattccttctcaaataaagtgaacgaactcgtctcccgctaccggaaagtcgacgaggatttcttcgaagagcttgaggaagtgctgattggcgctgacgtaggttttacaaccgttatggagctgattgatgagctcaaaaaagaagtgaagctgaaaaacatccaggatcctcaggaagtgcagtccgtcatttctgaaaagcttgtcgacatttataatagcggcgacgaacagatttctgaattaaatattcaggacgggcgcctgaacgttattctgcttgtcggggtaaacggcgtcggaaaaacgacaacgatcggaaaacttgcccataagctgaaaaatgaaggcaaatccgttgtgctcgctgccggagacaccttcagagccggggcgattgaacagcttgaagtgtggggggagcgtacaggcgtgcctgtcattaaacaggctgccggaagcgaccctgctgcggttatttatgatgccgtacacgcggctaaagcaagaggagcggatgtgctgatttgtgatacggccggccgccttcagaataaagtaaacttaatgaaagagcttgaaaaagtcaaacgtgtcatcgaacgcgaagtgcctgaggctccgcatgaggttctccttgcgcttgacgcgacgacaggccaaaatgcgatggcgcaggcgaaagaattctccaaagcgacgaatgtgacgggtatcgcgttaacgaagcttgacggcaccgcaaaaggcggtatcgtcctggcgatccgcaatgagcttcatatccccgtgaaactggtcggcctcggagaaaaggttgacgatctccagcggtttgatgcagaatcttacgtatacggtctcttttctgatttagttgaaaaagccgaggattaatgaataaaaaacgagtataaaatggacggttttatactcgtttttttatacgcattgatagatcggaatggagggggcaattgttggacaaatggctgaaagctgaattggaaagtaagatcggcgcgataaaccatatgtcgctgttggatgaacagggaggcacttcaaccgttcgaaaaatagtgaccggccaagacgcatttctgctgaaaagttcttttcaacagaagtatcgggaatggttaatgagagaagccttcgttttacaaaaactgacggaaactcgtcgtctgcctgttcctatttattatgggatgatacaggaacagcatgccagccatatcctaatgtcatttgaggatggaatcaccctgacttcggctttaagaaaagcaaaaggggatactgaaaagaaaaagctgatcaaaagtttcggccagtttctgcaacggctgcatgaaaccgaaatggtctctggtttacagccggaaacagactggctcgatctgcaaatcaaacgagccggggaatatgtcaaaaaaggacaggctgaaggaagtgcagagcttttgaaggaattggacaggtgcaggcctgttcctgttcagcagacaatgattcacggtgactgcacgactgataatgtgctggtgaaagacggagaggtctatctgtttatcgatgctgcgggaatatcggcgggagatccgcgatatgatgaatcattagcaatcagtcattttgtcacaaatgaagcatgcctcaatgctttttacgaaggctattgccgctatcgtgtatcaaaacaagaattcgagtattttaacgacggtctatatgaatttttttaaaaaaacttattatgtaaaaagagcatcatgctttgacaagataaaaacttgacacacgctctgaaaccatgtaaactaagtttttgtaaagggatttgacttaacaaaggggagagctcaaatgtcgctcgaaaaaacgacgagaatgaactatttatttgacttctatcagtcgttgctgacgtcaaaacaaaagagctatatgtcgctttattatctggacgatttctcccttggtgaaatagccgaagagtatgacgtttcaaggcaagccgtttacgataacatcaaacggactgaagcgatgcttgaacaatatgaagaaaaactgctcctttttaaaaagtttcaggagcgtaaagaaatgtttacaaagctgaaagagcttgcttccgggttgcaggaagagggaaaaatgacggctctgattgaagcgcttgagaaattagattaggaggcggcaaacaatggcatttgaaggattagccgaccgactgcaaaagacgatttcaaaaatccgtggaaaaggaaaagtcagcgaacaagacgtaaaagagatgatgcgtgaagttcgtcttgcgcttcttgaggctgacgttaactttaaagtcgtaaaggattttgtgaaaaaagtaagtgaacgggctgtcggacaggacgttatgcagagtctgacacccggtcagcaggttattaaagtcgtaaaagaagagcttaccgagctgatgggcggcgaagaaagcaaaattgccgtcgccaaacgccccccgaccgttattatgatggtcgggctccaaggtgccggtaaaacgacaaccacggggaagcttgccaacctgctgcgcaaaaaacataaccgcaaaccgctgctcgtggctgcggatatttaccgccccgccgcgattaaacagctggaaacactgggaaaacagcttgatatgccggtcttttcgcttggcgatcaggtcagcccggtggaaattgccagacaggcgattgaaaaagcgaaggaagagcatcatgattatgtgattttagataccgccggacggctgcacatcgatcatgaactgatggatgagctctccggcgtaaaggaagtcgcaaatcctgaggaaattttccttgtcgtcgactcaatgaccggtcaggatgcggtaaacgtcgccaaaagctttaatgaccagctcggtttaacgggtgtcattttaacaaagcttgacggggatacccgcggaggtgcggcgctttctatccgcgcggtcaccgaaacgccgattaaattcgccggaatgggagaaaagctcgatgctcttgaagcgttccatcctgaacggatggcatcccggattctcggaatgggtgacgtgctgacgctgattgaaaaagctcaggcgaccgttgatgaagacaaagccaaagagcttgagcagaaaatgagaacgatgagcttcacattggatgattttctggagcagctcggccaggtccgaaacatggggcctcttgacgaactgctgcaaatgatgccaggcgcaggcaaaatgaaaggcttaaaaaacatccaagtcgatgaaaaacagctgaatcatgtggaagcgatcattaaatcaatgactgttcttgaaaaagaacagccggatatcattaacgccagccggcggaagcggattgccaaaggaagcggaacatccgttcaggaagtcaaccgtcttttaaagcagtttgaggaaatgaaaaaaatgatgaagcagatgaccaacatgacaaaagggaagaaaaaaggctttaaattaccttttatgtaatcggttatacatgataaaaccgttgttaagaaaaaacactttacaaacacttttatcattgttaatatactatcttgttgaaatattttcggaggtgctagtaaaatggcagtaaaaattcgtttaaaacgtatgggagcaaaaaaatctcctttctatcgtattgttgtagcagattctcgttcaccgcgtgacggccgtttcatcgaaacagtcggcacatacaacccggttgcaaagccggctgaagtgaaaatcaacgaagagcttgctcttaaatggcttcaaacaggagctaaaccttctgatacagtccgcaacttgttctcaagccaaggaattatggaaaaattccacaacgctaaacaaggcaagtaatgactgatcagaacttggaagatttgattgtcagcattgtggctccgcttgtcgaccatccggaagacataacggtcacaaaggaagagactgatcaaaagattgcgctgcgcttatctgtcaataagtcagataccggtaagattatcggaaagcaaggccggactgcaagagcgattcgaaccgtcgtttttgcagctggcgcacagtcttctaagaaagttcaatttgaaatatttgactgaaaaagggagagggccggcacctcccctttttttacacgtaaaaaaggcaaatgaacagaaatatgttggaagagtggggagtctggtcctatgcagattattcacagggtaaccgttatgcaggttctgaccgagcaaagcaaggaaaagcttttggcctcttttgcagaaaaaaagcaaacgcttgaacgagaatgcagccagctctattttcagcttagaaaacatgaaaaagatcagcagaatcccgatgtagcggaatcttttaaaaaagccattgaaaaaagacaagacaaaatcaaaatgatcgatttccaaataagccagacagagtcgctcccgcttggaagcgaagtgaaggaaaaggagatcgatgcgctgctttcaatcaatgtcggtgataactggcatgaaaaaacagcggcaaataccatcgtcataaaagacggggtagtaattgaaatccgcccgaggtgataatatgacaaacagatggtttaatgtaggcaaaattgtaaatacccacggcattaaaggcgaagtgagggtcatttctaaaacggactttgccgaagaacggtacaagcccggcaatacgctttatttgtttgcggaaggggctgcggagccaatcaaagtaacggtcagcgcccacaggcttcacaagcagtttcacctgctgcaattcaaagaaatgccgagtctcaatgaagtcgagcacctaagaaacatggtgatcaaagtccctgaagaagacttgggagagcttgaagaagatgaattttattttcatgaaatcatcggctgcgaggttgtgtcagaagacggggaactgatcggcacagtgaaggaaatcttgacgcccggggctaatgacgtatgggtggttgcaagaaaaggcaaaaaagatgcgctcattccgtatattgcttctgtggtaaaggatattaatataaatgagaagaaaattaagattcatgtaatggaagggttaatagacgaatgaaaatcgactttttaacactgtttcccgaaatgtttcaaggggtgctcggctcatccattctgcaaaaagcacaggaaaaagaggctgtccgttttgacgtcatcaatttccgggctttttcggataataaacaccaaacggttgatgattacccgtacggcgggggagccgggatggtgttaaagccgcagcctgtatttgatgcggttgaaaagctgacagccggtacggacgccaagccgcgcattattctcgtctgcccgcaaggtgagcgttatacgcagaagaaagccgaggagctggcggaagaggaacatctcatgtttatttgcggacattatgaagggtatgatgaacggatccgggaacatcttgtcaccgatgaaatctccatcggggattttgtgctgaccgggggagagctccctgccatgatgattgccgacagcgttgtcaggcttttgccgggcgtcctcgggaaagaagcatcccacgtggaggattccttcagcacggggcttttagagcatccgcactatacgaggcctgcagattataaaggcttaaaagtgcctgagacccttctgtccggcaaccatgcaaaaatacaagaatggcgcaataaagaatcaatcagaagaacctttttaagacgtccggatcttcttgaaaactatcctctcactgatgagcaaagaaaatggatttccgagtgggaaaacgaatagattctattgcgcaggcgatgaagatatgataagatactacttgtggcttaaggaggcttatccttcagaagcttgaaaacgatgttccgctgtgccttgcagttgtggccaagagcatctgttggaaggagttgaaaacgatgcaaaaactaattcaagatatcacaaaagaacagcttcgcactgatcttcctgcgttccgtcctggtgacactttacgtgtacacgtaaaagttgttgagggtaaccgtgagcgtatccagatcttcgaaggtgttgtgattaagcgtcgtggtggtggaatcagcgaaacgttcacagttcgtaagatttcttacggtgttggcgttgaacgtacattccctgtacacacaccaaaaatcgcgaaaatcgaagttgtacgttacggtaaagtacgtcgcgctaagctttactacctgcgtgaacttcgcggaaaagcggctcgtattaaagaaatcagacgataatgataacgaacgaaaagagcttgttacccgtaacaggctctttttttatatgaaatttgtaaaagctgaacaagcaacgtaaaatacataagagatcatcggaacatccggttccggcaaataaggcaggtgtcgaagtcacatgactattcaatggttcccaggccatatggctaaagcgagacgggaagtaacagaaaaactgaaattaattgatatcgtatacgaattggtggatgcgagaatcccgatgtcatcgagaaatccgatgattgaggagattttaaaaaataagccgcgcattatgcttttaaataaagccgataaggcggatgcggctgtgactgcccagtggaaggaccactttcaggaacagggcattccctctctttcaataaactccgttaacgggcagggactgcatcaaatcgtgccgtcctcaaaagagctgctgaaagataagttcgataaaatgaaagcaaaaggcattaggccaagagcaatccgcgcattaatcatcggcattccgaatgtcggcaagtctactctcattaaccggctggccaagaaaaacattgccaagacgggagacaggcccggcattaccacttcacagcagtgggtaaaggtaggcaaggaattagagctgctcgatacaccgggaattttatggcctaaatttgaagatgagcttgtcggcttgcgcctggcgatcaccggggcgattaaagatacgattatcaacctgcaggatgtggccgtcttcgggctgcgctttctggaagagcattatcccgaccgcttgaaggagcgctacggacttcaggaaatccctgaggatatcgccgctcttttcgacgcgatcggtgaaaaacgcggctgtttgatgggcggcggaatggttgactatgataaaacaacggaagtcatcattcgggacatccggacggaaaaattcggcaggctttcatttgaaacaccatcagaataaagacgcgcagcgatgcgggtctttattttttccgcagaataccgatatacataatgtaagggagaagagaacgtgaatacattaaccgtaaaaagcgtaaaagaacgcctgcaagaggtcagggacgaaagtgaccccttcctttcccaatgtgagaaagacccgagaaaaagcgtacagacgcttttagagcaatggctgaaaaagcacgcgaaggaaaaagctcttaaagagcaatggctgaacatgacggcatacgaaagactgtcatccaaaaagggcttccgcctgattgcgggtgttgacgaagccggaagagggccgcttgccggaccggttgtcgccggcgccgtcattttgccggcagaatgcgagattctcggtctcacggactcgaagaaattgtcggaaaagaagctcgaggagtattacagccggatcacggaagaagcggcggctgtaggagtcggcattgtccatgcggacgtcattgaccggatcaacatatatgaggccgcgagactggcgatggtaaaagccgtcaatgctttaacggaaacacctgattatctgcttgttgatgccatgacccttccgcttgacattccgcagtcatcagttataaaaggggatgccaaaagcgtgtcaattgccgccggagcctgcatagcaaaagtaacgcgggaccgtctcatggctgagtacgccaaaacctaccccatgtacggctttgaaaaaaataaaggctacggaacgaaagaacatcttgaagctcttcaggcatacggaccgacaactattcaccgaaaaacgttcgctcccgttcaatcttattgttagaaaagaggcttaagacatgaacataagcggcgaaatccaagcggctttcagacagctgacggcggaaatccctccggaccggcaagatggcggtaaagacagcggcgctcaaaggctgctgttagggaaggttctccgtttgctggacgatcaaagcgctcttatccaaatcggcggccggacgatgcagggaaaacttgaaaccgcccttcgtccgcaggcgtattactggttttcttatgacaaacagccggcggaaaaaacgggccggcttcatgtcatcgaccaattcgaaggaagcccgaaaaccgttcaggaagcggcgggaagactgttaaacgctctttccgtcaaaccaggtcctgtgtctctgcagattgccgaaacatttatgcagcagaagctgccgatgacggaaaacagcctcaaagcctgtatccgctgggctgaatcgcttccggccgccgaattgaaaaaagcggcggaaacaatcgtatttgcgctgaaacgggaactgcccgcacatccggaagtcttgtcagccattcatgccgttaaatatccggttccgacccggcgcctcctctcaggactgcttcaggcaatcaatcaggctccgcaatcggcaaaagagctgtctgtgctcaaagaggcggtttctgacgtgttaaacgcggaaacggatctacatgcagaacgtctcttgaagaagcttgccgaggctgcacgcatgccgatctcagaaaccgggctgatggatgaaggagaacggacggaatcaaaacaatcaccatttgtccgagagactcgtgaaaacggaaaggcagtctcaagccaaccttctcctccgagtgcacggacagatacggaactgcctgaaaaaacggcaaaacagattatagagaaattaatgacatcggcagaaaaaactgaaaaccgtcccgtaaaagtaacggcggagatcatgaagactttcatttctcaagaaaaaacattgaaaacaacgcctgttcttcaaaacgcacatctgacagaacaggaggcggctgttttcgaaaaagccgttcagctcaccgaattgaaatatgcggaaaaacatgatgtattaagccttttgcagaaaatcaaaaaaggactgggcacgcgtgatgaattatcattcattacagcgcttgaaaaaggcgtgtctccgcagccggagaaacaagcgctgaaaacagccctccaagccgtccggacgcttcaagaagcgccccaatccgttaaacaagaggcggaaccgcttattcataaattaaacggccagctgtttattgagcagcataacccttcttttacgcagatggtgctgtcatttccgctgggagcgtccgcgtatgagaatgacatcacagttctctttaaaggacggaagaagccggacggaaaactcgatccgtcacattgcaggctcctgtttttgctgcatcttgaaacactgcaagaaaccgttgtggattgcatgattcagcaaaatgtaatgaccattacggttgagactgattttgagcttcaggcggccatcgaccctctcgtaccggctttaaaagaagccgtaaaagaaacgggcttcagcctgtcaggcgtcacgtctaaaaaacggcgcccgaaagaccagagcgctcttgtggaagagtttatagaaaaagacggcggaagaaaagtggatgtgaaaatatgaaagagcaaacgccgttaagaagagctgtcgccctgcattacgaccggcagaaagaccaagccccgaaggttgtcgcaacaggcagggggcacgtggcggaaaatattataaaagaagctgagaaggctggggttcccattcaggaagacagaacccttgtcgaattaatgcgccatttgacggttgacgatcagataccggaggcgctttatgaaaccgttgccgaaattttttcatttgtttacagactggacgaaaccctgaaaaacgaaaaataaggaccattcatttcccggactccgtttaaatttatattttcaataaaataaaagttagaatgtttggaaggatataaagattttgttttgaaccctagacaattcttccagtattatatagaatgaaagcgcagtctatttttagttttgctacataagttaggaggatgggaaatgaatatccatgagtaccagggaaaagaagtcctcagaaaatacggggtgtctgttcctgaaggtaaagtggcttttacagcagaggaagcagttgaaaaagcagagagcctgtcaagctcggtttatgtcgtaaaggcgcaaatccatgctggcggccgcggcaaagctggtggggtaaagattgcaaaaacaaaagatgaagtgaaagagtatgccgaagaactgttaggcaagacgctcgtcacacatcaaacgggtccggacggacaagtaataaaacgcttacttattgaagaaggctgcgatattaaaaaggaatactatgtcgggcttgtacttgaccgcgctacttcaagaatcgttttaatggcgtctgaagaaggcggaacggagattgaagaagtagcggaaaaaacacctgaaaaaattaaaaaagcggtaattgatccggctgtcggccttcagggctatcaggcaagggaaattgcattcgcaattaacatcccgaaagagcttgtcggcaaagccgctaaatttatgctcggcttatataaagcatttgttgagaaggactgctccatcgccgagatcaaccctctcgtcgttacgggggacggaaacgtcatggcgctggatgctaagctgaacttcgacagcaatgcgttatacagacaaaaagacattatggaatacagagatttagatgaagaagatccgaaagaaatcgaagcgtcaaaatacgatttaagctacatttcccttgatggaaatatcggctgcatggtaaacggcgcgggtcttgcaatgtctacaatggatatcattaaacactacggcggagaacctgcaaacttccttgatgtcgggggcggcgcaaccgcagaaaaagttacggaagcttttaaaatcattctttccgatcaaaacgtaaaaggaattttcgttaatattttcggaggcatcatgaagtgtgatgtcatcgccgagggcgttgttgaagcgacgagacaagtcggattgacattgccgctggtcgtgcgccttgaagggacaaacgtagatttaggaaagaaaatcctgaatgaatcaggcttaaacatcacatctgcggaatcaatggcagacggcgcacagaaaatcgtatccttagtttaggaaagaatgaaaggcaggggaccagataatgagtgtttttatcaataaagatacaagagttattgtacaggggattacaggttctaccgctttatttcatacaaagcagatgctggaatacggcacgaatatcgttggcggtgtaacacctggaaaaggcggaacggaagcggaaggcgtaccggtattcaatacggtcgcagaagcggttcatacaacgggcgctgatgcgtcagttatttacgtgccggctccgtttgcggcggacgcaattatggaagcggttgacgcggaaattgatcttgtcatttgtatcactgagcacattccggttttggacatggtgaaagtgaagcgctttatggaaggcaagaaaacgagattaatagggccgaactgcccgggtgttattacacctgaagaatgcaagatcggcattatgccgggatacattcataaaaagggtcatgtaggcgttgtatcccgttcaggaacattgacatacgaggccgtccatcagctttcagaagccggcgtaggccaatctaccgctgtagggatcggcggcgatccggtcaacggcacgaactttattgacgtgttaaaagcgttcaatgaagatccagaaacacatgccgtcatcatgatcggagaaatcggcggcacagctgaagaagaagcggctgagtgggtgaaagcgaacatgacgaagcctgttgtcggctttatcggcggtaaaaccgcgcctccaggaaaacgcatgggccatgcgggcgccatcatctccggaggaaaaggcacggcagaagaaaaagtcaaaacgatgaacgcctgcggaattgaagtcgcggaaaccccttctgtaatgggtgaaacgctgattaaggtgttaaaagaaaaaggcttatttgaaacgtgcaaaacgcactgatcgaagcaggggcagccgtaacggctgttcctgtttttgctgaaaaaaagaggaggttgccagatttggatcaagcatcgcgctgtttaatggtctgcagtattaatcaaatcatttccccgtctcttctattaaaatggtggaaagctgatcactctctgtcttttttaccggatccgcatccattaactgttttatcagaagggaaaacagccccggaagcaatttttcgggaaatagagcgcaagaattcggaacttgatgaagttctgtccgattaccgccgcgaaggcattactgtcattccgatttcgtcaagccgctatccaacatggcttaaagcgatttatgatccgccggctgtcttgtatgcaaaagggaacacgctgcttcttgaaaaaggcagaaaaatcgggattgtaggaacgcggaaaccgacggaagacggaataaaagcggttgggcatctttccgccgaactctcaaaaaaaggctgggtcattgtaagcgggcttgcatccggtatagacggattgtctcataaggcgagcatcagggcaaaagggcttacgatcggcgtgatagccggcggattccatcacatctatccccgggaaaatctcctgttagcagaatacatggctgaacaccatctcctactctcagaacatcctcctgaaacaaagccgaaaaaatggcactttccgatgagaaaccgcataatcagcggactaagtgaaggaattgtggtcgtgcagggaaaagaaaaaagcggttcattaatcacagcttaccaggctctcgatcaaggcagagaggtatttgccgttccgggttccatatttaatccatattccggaggacctataaaactcattcaagaaggggcgaaagctgtattatgcgcagaggatattgacggagagctgaccgcccgatgcgttcagtatacggaacccttttgaaatatcgtttgacaaacggtattgtaatatttaataatagtgaggatttaaagttgcacattattttcatgtataaaatgacgttcatcataaagaatggaatgttgaaagccataaaaaggcagctctaaaataaattgatacttgaaaagagagagaacacctcttgagggggatgaaaatgtctgattatctagtcatcgtggaatcgccggcaaaggcgaaaacgattgaacgttatttagggaagaaatataaagtcaaagcttcaatgggacatgtccgggatcttccgaaaagtcaaatgggagttgacatcgaacagaactttgaaccgaaatatattacgatccgcggaaaaggccctgttttaaaagaattaaaaacagcggcaaagaaagcaaaaaaagtctatctcgcggccgaccccgacagagaaggggaagcgattgcatggcatctcgcacacagtcttgatctggatctcagctcggactgccgggtcgtctttaatgaaataacgaaagacgccattaaagaatcatttaaacatccgcgcatgattaatatggatcttgtcgatgcgcagcaggcgcgccgcatactagacagactcgtcggatacaaaatcagcccgattctttggaaaaaagtaaaaaaaggcctcagtgcgggccgtgtgcaatccgttgcgctccggctgatcatcgaccgggaaaaggaaatcaacgactttaaacctgaagagtactggacgattaccggctcatttttaaagggaaaagagacgtttgaagccggatttttcggaaaaaacggcaaaaagcttcctttaaaaaacgaagaagacgtaaaagccatccttgcccagctgaaaggcaataagtatacagttgacaaggttacgaaaaaagagcgcaaacgaaatcccgctctgccgtttacaacgtccactctgcagcaggaggctgcaagaaagctgaatttcagagcgaagaaaacgatgatgatcgctcagcaattatatgaaggaattgatctcggcaaagaagggacagtcgggctcatcacgtatatgagaacggactcaacgcggatttccaacacagccgttgaagaagcgtcagcttttattgatcaggcgtacggaaaagagtacttagcgggaaaacggaaaccggcaaagaaaaatgaaaacgctcaagatgcccacgaagcgatccgcccgacttcggtgctcagaaaacctgccgacttaaaagcggtgcttggaagagaccagctcagattatacaagctgatttgggagcgctttgttgcaagccagatggcgcctgccgtccttgatacgatgagcgtcgatctcagcaataacggattgacattccgggcaaacggaagtaaagtcaaattcgccggcttcatgaaagtctatgtagagggtaaagacgatcagctggaagaaaaagaccgcatgcttccggaccttaaagagggagacacggttttatcgaaagatattgagcctgagcagcactttactcagccgcctccgcgttatacagaggcgcgcctggttaaaacgcttgaagaactggggatcggccgtccttcgacatatgcgccgactcttgacaccatccagcgccgcggttacgtgggattagacaataaacggtttgtgccgactgagcttgggcagatcgtgctggatcttatcatggagtttttcccggaaatcattaacgttgaattcacggctaaaatggaaagagaccttgaccatgttgaagatggccagacagaatgggttcaaatcattgacagcttctatactgatttcgaaaaacgcgtgaaaaaagcggaagccgaaatgaaagaagtggaaattgaacctgaatacgccgatgaagattgtgagttatgcggctcccggatggtttataaaatgggccggtacggcaaatttatggcgtgctccaacttccctgactgccggaatacaaaaccgattgtcaaacaaatcggcgtaaaatgccctaagtgccatgaaggaaacattgtcgaacgaaaatcaaaaaagaaacgcatcttttacggctgtgaccgttatcctgaatgcgacttcgtatcttgggacaaaccgattgaacgaaaatgcccgaaatgtgaaaatatgctcgtagagaaaaagcttaaaaaaggcatacaagtacaatgcgtcgaatgcgattataaggaagaaccacagaagtagcggtgagcagagccttgctcaccttctttgtgtggaagggacaaacaacaggagatgaaaagaaatgaaccagcaaacagttaatgtaatcggagcaggccttgccggaagtgaagcggcatggcagcttgcaaaacgaggaattcaagtgaaactatatgaaatgcggcccgtcaggcagacggcagcccatcatactgataaattcgccgaactggtatgcagcaactccctccgttcaaatacactcgccaatgcggtaggcgtattaaaggaagaaatgcgggcgcttgactcggcaatcattcaatctgctgataaatgttcggttccggccgggggagcgcttgccgttgaccgtcatgaatttgcgcaaagcgtgacggatctcgtgaaaaaccatccgaacgtaacggttcttactgaggaagtaacagagattccggaaggcccgactgttatcgcgaccggaccgcttacgtcagaatcgctttcacagcagctgaaagagctcacgggagaagagtatctgtatttttatgacgcggcggcgccgattgtcgaaaaagacagccttgatatggagaaagtgtacttaaaatcccgttatgacaagggagaagcggcgtacttaaactgcccgatgacagaggaagagttcgaccgtttctatgaagcattgacgacggctgagacggtacctttaaaagaattcgaaaaagaaatcttctttgaaggctgcatgccgattgaagtcatggcgaaaagaggcaagaaaacgatgctgttcggaccgatgaaaccggtcggactggaagatccgaaaacaggcaagcgcccttatgcagtcgttcagctcagacaggatgatgcggcgggaacgctttataatattgtaggttttcagacacatttaaaatggggagaccaaaaagaagtgcttaaactgatccccggtcttgaaaatgttgatatcgtcagatacggcgtcatgcacagaaacacatttatcaactcgccgagccttttgaacccgacatatcaatttaaacagcggaacgatctgtttttcgcgggccaaatgaccggcgtagagggttatgttgaatctgccgcttcaggtcttgtagcgggaatcaatgccgccaaacttgtgctcggtcaggatcttgtgacattcccgcaggagacggcgatcggaagcatggctcactacattacgacgacgaatcagaagaacttccagccgatgaatgcaaacttcggcctcttaaaagaattgcctgtaaaaattaaaaacaaaaaagaacgaaatgaagaatacgctaaacgcgcaattgaaactattcaaactatttcgaaaacgatatagcttttcattgcaacttcgatgcattatatgataccatttaaaagcccttcggagagggaggtcttcataatgactgagaatgttaacttttttttaaagttattcgttgaatatttacaaattgaaaaaaattattcacaatatactattgtgaattatgttaattcgattgaagaatttgggatgtttctgcatgctcaaaatataaatggaatgaaagaagctgcatatcatgatgtgagaatatttttgacagaggcttatgaaaaaggcctgtcaagaaaaacaatcagcaagaaaatttcagctttgagaagcttctataaatttttaatgagggaaaagcttgttgaagagaatccgtttcagcttgttcatctgccgaaacaagagaaacggattccgaagtttctttatgaaaaagaacttgaggaactattcgctgtttcagacagaagtcagccgtcagggatgcgcgatcaggccctgcttgagcttctttatgcgaccggaatgagggtcagtgagtgctgtacgctcactgtcggcgatcttgacctgttcatggatacggtgctcgttcacgggaaaggcaagaagcagcgctatatcccgttcggctcatatgcccgtgatgcgctggagctgtatatcaacagcggaaggcagtgcctgcttgaaaaagcaaaagagcctcatgatgtgctgtttgtcaatcaaagaggcggcccgctgaccgccagaggaatccggtatattttaagcgggcttgtaaaaaaagcatccggcactttacatatacacccgcatatgcttcggcacacgtttgcgactcatctgctgaatgaaggggctgatttaagaagcgtccaggagcttttgggccattccaatctgtcttctacgcagatatacacgcatgtatcgaaggaaatgctgagaaacacatatatgtcccaccacccgagagcttttaaagaaaattaaaaggaggcccttctcatgtcatcttttcatgcgacaacgatttttgccgtccagcataacgggaaaagcgctatgtcaggagacggccaggtcacattcggtcaggctgtagtcatgaaacataccgcgagaaaagtgagaaagctgtttaacggaaaggttctggccggatttgcaggatctgttgcagacgctttcacactttttgaaatgtttgaggcgaagcttgaagaatacaacggcaatttaaaacgtgcgtcggttgagcttgcgaaagaatggcgcagcgataaagtgctgcgcaagctggaagccatgctgattgtcatgaaccaggataccttgcttctcgtatcgggaacaggtgaagtgattgagccggatgacggcattttggcaatcggctccggcggaaactacgccctgtcagcaggaagagcgctgaaaacctatgccggagagaatctgtccgccaaagatattgcaaaagccgctttgaaaatcgcgggcgagatttgtgtgtacacaaacgatcagatcattttggaagaacttgaatagaaaggacttgaggcgcatggaaaacaaaccgttaacaccgagacaaatcgtagatcggttggatcaatacattgtaggacagcaggatgcgaaaaaagctgtcgccgtggcattaagaaaccgctatcgcagaagtcttcttgatgaaaaactgagagacgagatcgttcccaaaaacatcctgatgatgggcccgaccggggtggggaaaacagagatcgccagacggatcgccaagcttaccggtgcgccatttataaaaattgaagcgacaaaatttacagaagtcggctatgtaggcagagatgtcgaatcaatggtcagagacctcgttgagacatccgtgcggctcattaaagaagaaaaaatcagcgaagtgaaagaacaggctgaagaaaatgcaaacaaacgtatagtgcggcttctcgttccgggaaagaaaaaacaagcgggtgtgaaaaatccgtttgaaatgcttttcggaggaagccaggcggcaaatgatgatgaagccgaccagcaggaagaagcaagccttgaagagaaaagaaagcgcatggcgcatcagctcgcattgggagagctcgaagaccattacgtctccgtagaggtggaagagcagcagccgtcgatgtttgacatgctgcaaggctccgggatggagcagatgggcatgaatatgcaggatgcgctgagcaatctggtgccaaaaaagaaaaaacgccgcaaaatgacggtcagagaagcaaggaaggttctgaccaatgaagaggcaggcaaattaatcgatatggatgaagtcggccaagaggccgtgttaagagctgaagagggcggcattatctttattgacgaaatagataaaatcgcaaaaaacggaggggcttcttcctcagcagatgtatcgagagaaggcgttcaaagagatatccttccgattgtcgaaggatctaccgtcgtcacgaaatacggctccgtcaaaacagatcacgtgctgtttatcgcagccggggcattccatatggccaaaccgtctgatctgattccggagctgcagggccgctttccgattcgtgtagaattgagcaagctgacagtagatgattttgtgaagattctcgtcgaacctgataacgccctgttaaaacaatatcaggctttattgcagacagaaggtatatctcttgaattttctgacgaagctattcgtaagatcgccgaagtagcttatcatgtgaatcaggatacggacaacatcggagcgagaaggcttcacacgatattggaacgtctcttggaagacctgtcgtttgaagcgccggacgtgacgatggaaaaagtcgctatcacgccgcaatacgttgaagaaaagctcggaacgattgcaaacaacaaagatctaagtcaatttatattgtgaaaatttaataagaggaattctaggaggattatttatcatggctttactacaaaaaacacgaattattaacagcatgctgcaggctgcggcaggcaaacccgtaaactttaaagaaatggctgaaacgcttcgtgacgtcattgattctaatattttcgtcgtcagccgcagaggaaagcttttgggctactctattaatcagcagattgaaaatgaccgcatgaaaaaaatgcttgaagaccgccagttcccggaagagtacacgagaaatctgttcaatgttccggagacgtcttcaaaccttgatatcaacagcgaatacacggcgtttcctgtagaaaacagagacctgttccaagcgggcttaacaacgatcgtgccgatcatcggcggaggagagagactgggcacgctcattctgtcccgtctgcaggatcaatttgaagatgatgatctcattcttgctgaatacggagcaaccgttgtaggaatggagattttaagagaaaaagcggaagaaatcgaagaagaggcgcgaagcaaagcggttgttcaaatggcgatcagttctctgtcttacagtgaacttgaagcgattgagcatatctttgaagagcttgacggaaacgaaggcttgcttgtggcaagtaagattgcggaccgtgtcggcattacgcgttcagtaatcgttaacgcgctgagaaagctggaaagcgcaggcgtcattgaatccagatcactgggaatgaaggggacgtacattaaagttctgaacaacaaattccttattgaattggaaaaccttaaatctcattaagacaaaagcaggatccctaaaaatgggcgtcctgctttttttatggacaataggtgaaaagttgcagtttaaagttgcttattggaatctgatctgagataatccatcttgctgtgtgaaaaaaggaggaagatacagaaattctgctattttcagtctaatattaaacaaatccttgtagtacaaatattctaggacttaatacctacatacaaaatagatataattgagcacttttttttagcctaacttcatagactttaagcctgttatttcttacaataagcatatggttttacaattctcgacaaggatttttaggagaaaaatatctgaaatggaggtaagtggatttggacttattttctggaactatacaaaatcttgagaatgccttggggagagcggacattaagcaaaaagtcttaactaataatatcgccaatatagatacaccgaactacaaggcaaaaaaagtctctttccgaaatttgttagatcaggaaacatccaatcttgaggctgtaaaaaccgactatcggcacgttgactttacgggttcgggggacgattattctatcgtgtccagcagtgatacatcgtaccagcaaaacggaaacaatgtcgatatcgacaaagaaatgacagatttagccgaaaaccaaattaattatcaggctttggttgaaagaatgagcggcaaattcaattctctgaaaaccgtcttgacaggaggaaaataatgagtggctttcaaagcttaaatatttcgggttccgctttaactgcacagcgtgtccggatggatgtcgtatcgtccaacctggccaatatggatacaacgagagcgaagcaggtaaatggcgaatgggtgccttacagaagaaagctggtatctctccaatccggaggcgaatcattttcgtcccttttacattccaagatgaacggaacagggagcgcgggaagtggcgtaaaggtatctggtgttacggaagacccgtccgcttttaatctcgtttatgatccggagaatcctgatgcgaataaagacggatatgtacaaaaaccaaatgtagatccattaaaggaaatggtggatcttgtcagcagctcgagatcatatgaagcaaacgtaactgcattaaacgcctccaaaggcatgcttttgaaggctttagaaatcggaaagtaaggtgatgtaagtggttaacgctattactccttttcagcttcaacaaacccaaaacactcaaaacgtaacgaatcaattaaaccaaactcaaaaaactgattcttcaaaccaaacaagcttttcggagcttttaaaaaactctattgattcgttaaatgagtcacaagtaaaatctgaccaaataacgaacgaactggctgcaggaaaggatgtaaaccttgacgaggtcatgatcgctgcccaaaaagcaaatatttctctgacggccgctaccgaattccgcaataaagccgtggaagcctatcaggaaatcatgagaatgcagatgtagtggtcagattgaagagaatgactggaatgaccgggggttaacatgaatcgtactctaatgcaaatgaaaaccaaaacggcagcgttttggaacaacagatcaaaaacacagaagatactcatggtaagcggcttggccgcattcattattttactcatcgtcgttattatttttacttcgtctgaaaagatggtgcctctttataaagatttgtccgcggaagaagcggggaagattaaagaagagctcgatacgaaaaaggtgtcttctgaacttgctgacggcggcacggtcattaaggttcctgagagccaagtggattcgcttaaagtccagcttgccgcagaaggcctgccgaaaacgggatcaattgattattcgttcttcggacaaaatgcgggcttcggcctgacagataatgagtttgacgttttaaaggttgaggcgactcagaccgaattgtcaaacctgataaatgaaatggacggtatcaaaagctcgaaggtcatgatcaatatgccgaaagaagccgtgttcgtcggtgaagatcagccggcagcatccgcttcaatcgttttgcagattaaaccgggctactcgcttgatcaaaaccagatcaacgggctgtaccatctcgtttctaaaagtgttccgaacttaaaagaagataatatcgtcataatggatcaaaattctacatattatgacaaaagtgacggcggtgcagggtccgtttctgacagttatgcttctcagcaaggtattaagtcgcaggtcgaaaaggacgttcaaaaacatgttcagtcactgctcggcacaatgatggggcaggataaggtcgtggtttccgtaacggcggatattgacttcacgaaggaaaaacgcactgaagacactgtcgaacctgtcgataaagataacatggaaggcatagcggtaagcgccgaaaaagttgcggaaacgtacaaaggcgacggcgcggccaacggcggcacggccggaacgggaagcaatgacaccgcgaactatgccgagacaaacggcggttcaaacagcggggactacgaaaaaagcagcaataaaatcaactatgaagtcaaccgcatccataaagaaatcgctgaaagcccgtataaagtgcgtgatttaggcattcaggtcatggtggagccgcctaatccgaaaaatgccgcttccttatcagcacagagacaggctgatatacagaagattttaggaacggtcgtcagaacgtctcttgataaaaacgaaacgcaaaatcaaaacctgacagacaatgatatcaacaataaaatcgttgtatccgttcagccgtttgacggaaaaacaagcctgaacacagattcggcacaatcttcaggtcttccgatctgggtatacattacaggcggcgtactgcttgcggccattattctgcttattattctcctcatcagaaagaaacgctcacaagaggatgaatacgaagaatatgaatatgaaacaccgccggagccggttcgattgcctgatatcaacgaagagaaaattgaaacggaagaaacagtcagacgaaaacagcttgaaaaaatggctaaagaaaaaccggaagactttgctaaattgcttcgaagctggctggacgaggattagggggaatggaaaatggcgaaacgtgatcagaacaagcttacaggaaaacaaaaagcagccatcctcatgatttccttaggccttgatgtatcagcttctgtatacaagcatttgtctgaagaagaaattgaaagattgacactcgagatttcgggagtcagaagcgtcgatcatcaaagaaaagatgaaatcattgaagaatttcataatatcgcaatcgctcaggactatatttcacaaggcggtttaaattacgcccgtcaagtgcttgaaaaagcgctcggagaagacaaagcggtaagcattttaaacaggctcacctcttctttgcaggtaaagccgtttgacttcgcaagaaaagcggaacccgaacagattttaaatttcattcagcaggaacatccgcaaacgatggcgctgattttatcctaccttgacccggtgcaggccggacagattttgtctgagctgaacccggacgttcaggctgaggtggcaagaaggattgcggttatggacagaacgtctcctgaaatcataaatgaagtggagcgggtccttgaacaaaagctgtcctcctcctttacgcaggattatacgcagaccggcggcatagaagccgttgttgaagtgttaaacggcgtagacagaggaacggaaaaaacgatccttgattcattagaaatccaagatcctgagttggcggatgaaatcaaaaaacggatgtttgtctttgaagatattgtcacccttgataaccgtgcgattcagcgcgtgatcagagacgttgaaaacgacgacctcctgctttcattgaaggttgcgagcgaggaagtcaaagaaatcgtcttcagcaatatgtcacagcgtatggttgaaacgtttaaagaggaaatggaaattatggggcctgtgcgtttgcgtgatgtggaagaggcgcaatcaagaatcgtgggcgtcgtccgcaagctggaagaagccggtgaaattgtaatcgcgcgaggcggaggagacgatattattgtctaatatcattaaacagcaatcatcattttctcctgaacaaaaacggcgcaagctttccttgcaggaagtcaggaaaacacattcccagccagatcgggaggaacccgaaaatccagaggctctcatggcttttgccaaagcagaagccgacagggtgtctgaagaagcgaaaaatcaatttgagcacactcttcggcagattgaagaagagaaaaaccgctgggtggaagaaaaacaaagattgatagaagaagcaaaggcagaaggatatgaagagggcatggcattgggaaaagccgaggctcaagctgaatacgctaatctcatcagccgggccaatgccgttatggaaatggcgagacagtcagtcgaggaaaaactggaaagcgctgaggaagaaattattgagctttcagttgcgctcgctaaaaaagtatggcggcaaaaaagtgatgataaagaggctttccttctgctggtcaagcaggtagtagccgaagtaaaagattatgatgacatctccatctatgtggaccctgaatattatgagacggttcatcagcatatggacgaaattcagcagctgttatacaaagaatgcagattaagcttatatgccgatgaaaaagccgcgaagggaacgtgctcgatagaaactccgttcggacgtgtcgatgcaggcatagacacccagctgatgcaattaaagcaaaaacttttaacggcgcttgaggcgggagcggagcaatgaagacacagtatttaatagactcaattgaaacagcggatccgtacaagcgctacggcaaggttaaacgggtcatcgggctgatgattgaatcaaaagggcccgaaagctcgatcggagatgtttgtctcatttatccgaaaggccatgcgaaaaaagcgattaaagctgaggttgtaggcttccaggatgaaaacattctgctaatgccttatctggaagcggccagcatcgcgccgggcagcattgttgaggccactggcgagtcgctccgcatcaaagtaggcgcgggtttaatcggacaggttgtcgacgcgttcggcgaacctcttgacggccgggcgcttccgaaaggattgtcccccgtttcgacggagcagccgccgccaaacccgatgaaacgcccgccgatacgggaaaagatgggtgtcggcgtcagatcgattgacagtctgctgacggtaggaaaagggcagagaatcgggatttttgccggaagcggagtcggaaaaagcaccctgatgggaatgatcgcgaagcagactgaagctgatttaaacattatcgcactcgtcggtgaacgggggcgcgaggtgcgtgaattcatcgagaaggatttaggcgaagaaggcctgaaacgctcgatagtcgtagtcgcgacctctgatcagcctgccttaatgcgtttgaaagcggcgtatacggccaccgccattgcagagtacttccgcgataaaggccggaatgtgatgttcatgatggactctgtcactagggtcgcgatggctcagcgggaaatcggcctggcagcgggagaaccgccgacaacaaaaggatatacaccttctgtgttcgctattttgccccgtttgctggaaagaacgggcgcgaatgaacaaggaacgataaccgctttttatacggttctcgttgacggagatgacatgaacgaaccgattgccgatacggtgcgcggaatattagacggccatatcgttctcgatcgggcgcttgccaacaaagggcagttcccggccgtgaacatcctgaaaagcatcagcagggtcatgtctaatatttcagacacatcgcatatagaggcggccaacaaattccgcgatcttctgtcaacttatcaaaactctgaagatctcattaatatcggagcttacaaaagaggatcatcaagagaaattgatgaagcgattcagttttatccgcagcttattcaatttttaaaacaaggaacggaagaacctgctcaattggaagacagcattgcggcattgacgagtctgacaggaaaagaggaataaacatcgtggcataccaattcagatttcaaaagctgctggaattaaaagaaaatgaaaaagaccaaacattgactgaatacagacaatcggtttctgaatttgagacagtggctgaaaaactatatgaaaatatgagcaaaaaagaattgctcgaaaaagacaaagaatcaaagctgaaatgcgggatgagcgttcaggaaatgagacattatcagcacttcgtttccaatcttgagaacaccatctatcattatcaaaagcttgtcatcatgaaacgaaatgaaatgaatgagaagcaggaacagctcaccgaaaaaaacattgaagtaaagaaatttgaaaaaatgcgggaaaaacaatttaatatgttcgcacttgaagacaaagctgcagagatgagggaaatggacgacatttcaatcaagcagtttatgattcaggggcattaggagcgaatgaaatggccgataaagaaaagagatctggaaagttcggttcaatcctgctttttatcatgatcccgctgatttttctgatcatcgtcgcaagcatcatcctttgggctgccggcgttgatgtgatgaagccgattcaggaaacagccgctaaaacgcctgttttaaaagaattggttcccgaaacgaaagaaatgaaaagcgcggcggaaaagcagaaagaagacagaacggcttctcttgaaaagaccataaaggaacaaaaaagtgaaattaacattttgaataaagatttagacacaagcaagtccgaaatcgataatctgaatcagaaaatccgttcactgaaacaggaagctgaacagcagcagaaaacgaagacggatgaaacgaaaaaagacgcttcggattcagccggaaaagataaaatgatcaacatctataaaagtatggacagcggtaaagcggcaagcattatcgtaaagctgaaagaaaaagaagccctcgatattttaaacggattaagtaaaaagcagcttgctgaaatcttgacgaaaatgactcctgaacaagcggctaaatatacagaaaaactatccgctgacggaaataaggagtgatgtaagttgaagctgcttgaattaacgggtaatcgtacgcagactgcgcaaaacagcaatgtgaagatgaatgtgaacagcttaggtctatttcagaactggctcctgtcggaaatcacttctccccggcagcccggagatgaaacaaaaacaagtgacgcagagctgaatgatgccctatcgaaaatcggtgattggctgaaagccggcccggaagaaaaagaattgcagctaaaacagctgcttgaggcggtaaaagctcttgaaggaaagcagacggctgaaacggctcttcctttattgaaacagcttgccgaatctgttgaagacatgttagcgggaaaacagcatggggcgaagcctgaaacggatgagccggattcttccgcaaaagacggggattccgtcaaggatgcgcttgagaaggggctgcttttcattcaagaagccgtatctcagctcttcacatctcagcaggaactgcctgacagcgcgaaggcaaaggcggtttaccaggaaggcgcccgtttattagaggcattgaaaaaacaaggcgttccggaccgcgtgattcaagacctgcggcagacattttttccgaaaaacgaatctgcatctaaactttactccatgacagccgctgagctgaagagctttcaaagcgtcgcggagcagcttgcgggcctttctcaaaagggaacaaaggaatgggatatggctgaaactgagctgaaagcttttgtgttatctcaatcatctgaatcatcccaagagtcagccgggaaaacagaacagcaaaacggcggcacggtttctcacgcaaaggcgcctgacagcaaattgtctgcacatatactgttttcgggagcgagaagccttgccggcattcagcaaacgtccgcaggagctgaacagcagccggcagaaaataaaccgttaacggatcaggtcatcagcggctggaaacagatgaaatacacgcctttcgggaaaacaaccggaagctttacgattcgtcttaatcccgagaacctcggatttgtcacaattaaggtgacaaacgaaaacgggatgtttcaaagcaaaataatcgcatccagccagtccgcgaaagagctgctggaacagcatcttcctcagctgaaacagtcgcttccgaatatgtcggtccaagtcgaccgttttacagtcccgcttcaaagcggggatcagcagcctgtttacgggcagacggccgatcacaataaacagcagcatcagggacagagagagcagaagaaccagcagcagtcaggcgatttcggagatatgctggaggagctttctctcaatgaaatggaggaagaatagttgacatcagtaaactcggattatgccgcggcgggcgcttcaaccacttcaagcgcgaagagcacctccgcagtaaacagcagcacgaatttagggaaagacgaatttctgaagatcttaatgacacaggttcaaaaccaggacccgctcaatccggttgatgacaaagaattcataagccagatggcgacattttcttcattggagcaaatgatgaatatgaatacgacgatgactaaatttgtagaaaatcaagatccgtttacgatgtatgtgaactggatcggtaaaaatgtcacattcagcgacagcgacgggaaggaccagacaagcccggtcaattcagtcaagcattcaaacggcaattacgtgctcgtgcttgaaaatggcaaagaggtcagtccgtggaatgtgacggccgtcagcgaaacatctaaataaaaagaaacccagggggaatttaacatgttacgttcattatattccggtatcagcggcatgaaaaactttcagacaaaactagatgtaatcggcaataacatcgccaacgtcaacacagtgggatttaagaaaagccgcgttacatttaaagatatgatcagccagacagtcgccggcggttcaaacgtgaccaattcaaaacaaatcggcttaggtgccgcgacttcttccattgatgttgttcattcaaccggcgccccgcaggctacacagaataaaaccgacctagccattgacggagacggctactttcagattaatacaggcgcgggaattgtttacacacgtgcggggaatttcggaaaggacaatcaagggaaccttgttacgactgacgggtactatcttgaaaaaatcggcggcggcaaaatcaatattccgactgatgcgaaagattacagcatcggtgcagacggaaccgttacatacactgatgcaggggatgaggttcatgatgccggacaaatcggtctggtcacgttccctaacagcgccggtctggaaaaaatcggaggcaacctttacagagaatcattaagttcaggagctgcgagcgcagtcaccactccgggcgaaaacggaacgggtaagcttttggcaggctatcttgaaatgtcaaacgtagatctgacagatgaatttaccgaaatgatcgttgctcagcgcggtttccaatcaaactcaaaaatcattacgacttcagatgaaatccttcaggagctggttaatctgaaacggtaaggagggaggagaggcggttaggccgcttctccggattgcatgattcaagtcacccgtttaaacggccagccttttacgctgaacgcgctgtttatcgaacagattgagtgcttccccgacacgacgattacactgtccaacggcaaaaaattcgtagtgaaagaaccggaagaagcagttctcaaaaaagtcatatcgttttaccatagcatacaaatattttcactggatcagggaatagaggaagaagaatgaagaaaaaattagtcatcattttgctgattattttaattgtcatcgccggcctcggaacggcagcatattttgtcgtcagcggaaattccggcaaaggcaaaaagccgacaattgacgaagtcgttgcagccactgtgtctgtcgacgatattacgacaaacttaaagtctgacagcatcatccgtatcggcatcaagcttgaaaccgactcggctaaagcgaaggaagaacttgaaaaacgcgattttcaggtgaaagacaacatcatttccattttagccgacacaagcgccggagagattgagggagataaaggaagagaagcgtttaaacaatcattaaaagagaaagtaaacagctatctccaagaaggaaaagttcagaaagtgtacattacctcctttaatctgcaataaaaacaaatttgacagaatacggaggtgaagaaaatgtcaggagaagttctctcccaaaatgaaatagacgcactgctttccgccatttccacgggtgaggcggatgcggaagagctgaaaaaagaagttaaagagaaaaaagtaaaggtatatgattttaaacgggctctcagattctcgaaagatcaaatacgcagtttaacccggatacatgataactttgcgaggcttctcacaacacacttttccgccaagctcagaacgtatattcatatatccgtcagctcagttgaccaggtgccgtatgaagaatttatccgttccataccgaacatgacgattttaaatttattcgatgttcatccgatggaaggcagaatcatgatggaggttaatcccaccatcgcatacgcaatgcttgaccgcgtcatgggaggcatcggcatcactcataacaaagctgacagccttacggaaattgaaacgaatattatttctaacttatttgaaaatgcactgggcaactacaaagaagcttggcaatcgattgctgatattgaccctgaaatgactgaatttgaagtgaatcctcagtttgtacagatggtttccccaaatgaaacagtcgttgttatttctctcaatacgcagataggtgaaatcagcggtgtcattaatctttgtattccccatgtcgtacttgagccgattatccctaagctttccgtacattattggatgcaatcagaccggaatgaagcgaagcccgaagaaacgaagttgcttgaaaagcgcatcatgacggctcaaattcccgttgtggctctcttgggcgcttctgaactgacaatagaagaatttttaagtttggaagtcggggactgtataactctggacaaatcagtgactgatcctcttactgtattggtcggaaacaaaccgaagtttttagggcaggccggccgggtgaatcgaagacaggcagtgcaaattttagatcacgacataagaggtgaacaagatgaacaatagattatctcaagatgaaatcgatgctcttcttaacggcacaaacagtcaatcagaggatacagaacagcctcaaggggcgaacttgtctgaacttgagcgcgatgcgatcggagaaatcgggaatatttcgttcggcagctcggctacggcgctgtccactcttttaaatcaaaaagtggacattacgaccccgagtgtgaccgtcatttcaaaaagcaaaatcagtgatgaatttcctcatccgtatgttgccattgaagtgaactacacagaaggctttgacggcagcaatttgctcgtcgtcgaacaaagcgacgcggccatcatcgcggatttgatgatcggcggtgacggccggggcgccgatccgtcactcggtgaaatccacctgagcgccgtgcaggaagcaatgaatcaaatgatgggctcggctgctacgtcaatgtcgaccgtgttcagtaaaaagattgacatttctccgccaagggttgaacttctggatgtgacggaagaaaaagggaccgacagaatacctgaggatgacctgctcgtaaaagtgtcattccgtctgaaagtcggcgaattaatcgattcgagcatcatgcagctttatccgattacgtttgcgaaagatctgatcgcagacctgatgactgcagaccagcatgagtcagaggccgcagaaaccgtatcagaacctcagcaaacatacgaaacgccgcagccggagcctgccatgcagccggagcctgccatgcagccggagccgcaggcaaaacccgagcttccgaagagacagggaaccgcaaaaaaagctgctcctgttcaagtcgctccggtagaattccaggcgtttgatcataacgaagcggcgcaaggatcaaggaataaccttgatatgctgatggatattccgctttccgttacggttgagctcggcagaacgaagagaagtgtcaaagaaatccttgaactttctgcgggaagcattattgagcttgacaagctggctggtgaacctgttgacatcctggtcaaccagcggatcgtggcaaagggcgaggtcgttgtcatagaagaaaacttcggcgtgagagtcactgatattttaagtcaggcagaccgccttaacaatttaaaataagcgaacatagaggagagaaacagattatggcacacagaattttaattgtagacgatgcagcatttatgagaatgatgatcaaagatattttagtgaagaacggttttgacgttgtagctgaagcttcagacggagcgcaggcagtcgaaaaattcaaagagcattcccccgacctagtgacaatggatattacaatgcctgaaatggatgggattacagctttaaaggaaattaaacaaatcgatccgcaggcgaaaatcatcatgtgttcggctatgggtcagcagtcaatggttattgacgcgattcaagccggcgcaaaagactttatcgtgaaaccgttccaagcggaccgcgtgcttgaagctattaataaaacattaagctaaagggtgtacgactgttgaaaaagagtcatggtttactagctttgatttgttgtttcgttttactcaatgtacatccgttccctgcttttgcggcggagtctgacaattccaccgtcaacgaatggtttgacaaacaatcaacaaacaaaacagagaaaaaaagcgatacatcgaaacaaacggctgatcaagagataggggatgcttctgcatcttctgtctccgcttttgattttgtaaagatgattggggcgttattattcgttattctgctgatctatggatttgtcaaactgatgaatagaagaaaccgtctgctgaagccgtttcaatatgtagaaaatatcggcggaacgtcagtcggccaaaaccgttccgtgcagctgattaaagtgggaaacagcgttctcgtagtcggtgtgggcgaaacgatacagcttttaaaagaaattgaagatgaaaaagagcgcgaggcgattctgagccaatacgaagagtcgatgtcttcaaaagtggaatggaccaagctcgtaaatccgcgtaaggatggagaaaaaaagccgcaaacgatgcttccgtcgttttcgaaagcgctgaaagaacagctgaacgagctgaaacaaagccgttctgaaggaaagaagaaaggcccttatcatcatgaatgaatttattaatctttttaattcaaacagtccgaccgaagtcagctccactgttaaattactgctgctattgactgtcttttcagtggcgccggggattctgattttgatgacctgctttacgagaatcgtcatcgttctgtcttttgtaagaacctcactggcgacgcagaacatgcctcccaaccaggttttaatcggccttgcgctgttcttgacgttttttattatggcgccgactttttcagagattaataaggaagccttaacgccgctgatggacaacaaaatcagtctcgatgaagcatatacaaaagccgagaagccgattaaagagtatatgagcaagcatacaaggcagaaggatctggcgctgtttatgaactatgccaaaatgaaaaaacctgaatcgattcaggatattcctttgacgacgatggtgcccgcttatgcgatatcagaactcaaaaccgcttttcaaatgggctttatgatttttattccgtttttaattatcgatatggtcgtggcgagcgtcttaatgtcaatgggaatgatgatgctaccgccggttatgatctctctgccctttaaaatattgcttttcgttttggtcgatggatggtatttaatcgtgaaatctttgcttgacagcttttagggtaggtgctaattgtgagttcagaatttgtaatttccatggcggaaaaagccgtatatgtaacactaatgatcagcgggccgctgcttgcgatcgcgctgatcgtcggtttgctcgtcagtatctttcaagcgacaactcaaatccaggaacagacgcttgcgttcattccgaaaatcgtggcggtgatgcttggactgatctttttcggtccttggatgctgtcgacgattctttcgttcacaactgatctgttctctcatctgaaccgatttgcagggtagaatcaaatgaattccatcattgatttatttcccgcttttttattggtctttatcagaatctctgctttttttgtaacggtgccggtgttcggacatcggaatctgccggcggttcacagaatcggctttgctttttttctttcggtgatctgcttcagcacgctgaaacatgcgccggaaatagaagtaggggaacagtatatgctgcttgtcataaaagaggccgttgtgggcttgagcctcgggctgattgctttcatgatgatgacagccattcagatagcgggttcctttattgattttcagatgggcttttccatcgccaatgtcattgatccgcaatcaggaacgcaaagcccgctgatcggacaattcgtttatacgctggcgctgttatttatgctcagcgtaaacgcccattatcttttattggacgggatttattacagctttcagtatatcccgcttgatcaggcatttccgtcgtttggaaatgatcactttggactttttatcgcaaaaagcttcaatgccatgtttattatcgcttttcaaatgtctgcgccggttgtggccagtctgtttttagttgatttggcgctcggcattgtggcgagaacggtgccgcagctgaatgttttcgttgtcgggcttcctctgaaaatagccgtgagctttattatgctgatcgtttgtatgtcggtgatgtttgtcgtcgtccgcaacatcttcagccttaccgttgaaaccatgcggaatctattggcattggtcggtgtgacatgatgagactcagactgaatctgcaattctttgccggtgaaaaaacggagaaagccactccgaaaaaacggaaggatacaagaaagaaaggacaggtcgcgaaaagtacggatgtgaatacagccgtttctttactgattatctttctttcgctgatcgcgctcggtccttatatgcgggacaggctgctgtcctttattaaaacgttttatacgaaatcgatatcattacatctgtcagcatctgccgtgcatgaactgttcgtggatacggtgaaagatatcagcctcatcctcgcgccgattatgctggtcgcgcttgtggcaggtgtcgtgagcaattacatgcaggtgggttttctgttttctgcggaagtgctcaagcctgacttgaataagctcagcccgctgaaaggatttaagcggatttacagcatgagggcgattgttgaactggtcaaatccattttgaagattaccgtggtcggttttgccgcctttatggtgctctggcttcattatggcgatattctccgccttccgcttttaacgcctgcggaagtgctcactttcgtttccaagctcacgctttggatggggcttgcgggatcaggggctttaatgctgctggccgggcttgattatttatatcagcgttttgactatgagaaaaatatcagaatgtcaaagcaggatataaaagatgaatacaaaaaatcggagggtgatccgattatcaagtccaaaattaagcagaagcagcgggaaatggcgatgaggcggatgatgcaggaagtgccgaaagcggatgtcatcattaccaacccgacccattatgcgatagctttaaaatatgatgaaaagaaaatggacgccccttacattgttgccaaaggggtcgaccatctcgcattaaaaatcaggcagatcgccaaagaacacgatgtcatgacgattgaaaacagaccgctcgcgcgtgcgttatatgatcaggttgacattgaccaggctgtgccggaagagttttttaaagtcattgcggaaattttggcttatgtatataaaacgaaacaaaaagtatagtgaatttcagattcaaaaggagagaaaaacagcatgtcaacaagagatttatcggttttaataagtgttgtcctcattgtggcaatgctggtgattccattccctccatggttgttaagtattttgatcatcattaatatctctcttgcgttgatcgtgcttctcaccacaatgaatatgcaagaaccgctgcaattctcgatattcccgtcattgctgctgttattgacgctgtttcggctttcgctcaatgtgtcgacgacacgttcgattctttctcacggagaagggggaaaggttgttgagacattcgggaatttcgttgtcggcggaaatgtgctggtagggcttgttgtcttcattatcttgattattattcagtttatcgtcattacaaaaggcgccgagcgggtatcggaagtggcggcgagatttacgctcgatgcgatgcccggaaagcaaatgagtattgacgcggatttaaatgccggcatgattacggagcaggatgcaaagcacagacgtgaaaaagtcggccgggaagcggatttttacggcgccatggacggtgcgagcaaattcgtcaaaggggatgccatcgcgggtatcatcatcgtgatgatcaatattattttcggaatcgtaatcggcatgctgcagcaggggatgagcatacaagaagccgcttctcactttacaatgctgacggtcggtgacggtatcgtttctcaaatgccggccttgctcatttcaacggctacagggattgtcgtgacgagagcggcatctgaaggaaacctcggtcatgatattacaggccagctgtttgcttatccgaagctcttatatgtagccgcgggaactgtacttttgctcggtcttcttacaccgatcggcattctgctgacggggccgatcgccggtctgcttgcattcggcgcttatacgctgtccaaaacggataagccgagcgaagaagaggaagaaattcttgaagaagaggctcaggcggatgaactgaaaagcccggaaagcgttgtgcagcttttacatattgatccgattgaatttgagttcggatacggactcgtgccgcttgcagacgcggggcagggcggtgatcttcttgaccgcatcgtcatgatcagacgtcagcttgcgcttgaattgggacttgttattccggttgtgcgcatcagggataacatcgcgctccagccgaatgaatacagattgaaaattaaaggcaatgaagtcgctaaaggagagctcctgctggatcattacttagcgatgtcaccgacgcctgaagatgacgtcattgaaggaattgaaacgattgaaccgtcgttcggacttcccgcaaaatggatcagcgaagctgcaaaagatgaagcggacatgctggggtatacagttgttgatccggcgtcagtcgtatctacgcatattacagaaaaaattaagcagcatgcccatgaactggtcggcagacaggaaacaaagcagctgatcgatcatctgaaggaaaattatcctgtgcttgttgaggaagtcacgccaaaccctctttctgtcggcgatattcaaaaggtgcttgccaaattgctgagagaaaaagtttcaatcagaaacttggtgaccatttttgaaactcttgccgattacgggagattaacgacagattcagatcttttgacagaatacgcgagacagtcgcttgccaaacaaatcacggcacaatatgcgagagagcatgaaacgctgaaggtcatcacatgctcaggccgggtggaaaaagcgattgcagacggggttcagcagactgaacagggcaattacctgtcactcgaccctgaggtttcagacagcatcatccgttctgtcgctaaagaagccgagcagctttccatccgtcaggagtcggcgattcttctttgctcgcctgctgtcagaatgtatgtaaaacagctgttagaacggtatttccctgatcttccggttctttcttataatgagctggaagcaaatgttgaagtacagagcattggagtggtggatatttaatgaaaataaagaaatttacagccgcttcaatgcaggatgccgcgaagcaaatcaaaaaggaactcggcaatgatgccgttattttacattccaaacaagtaaagaaacgaaaatggctggggctgcggtcgcagcaggccgtcgaagtgatagcggttttagatcgtgacgtcagggaagcgagaaaaacgccgccggctgccgctgaagaaatgaaaaagacggaaacagcggagaaagctgagcctgttcagccgccgcgtcttccggatcaaagcatttccggcgaactggcgcattttaaagaagtgctccctgaaccattaaaaaaagccgagagactattgaagcaagccgggcttcctgatcatacgcaaaacgccgtactcagtgaattgctccgttcttcaattgtttccggagatttaactgaagataatgtcagctcaaaactgcaggatttgttagtgaaaaaactcccttcggcagacaggtggcaggaagggattcaatcaaaatacgtcgtgcttttcggttcaaccggggccggcaaaacgactacacttgcgaaactcgcggcctcatcaatgctgacagagcataaaaaaattgcctttatgacgacggatacttaccggattgccgcggtcgagcagctgaagacatatgcggagctgcttcaggctcctcttgaagtatgctattcaaaggaagaatgtctgaaggcactggaaaaattcgctgaatatgaccatgttttcattgatacagccggtagaaactttaaagaagagcagtatattacggaattacaagagatgattccgtttgaatcaggcttacaatcctttctcgtattatcggcatctgcaaaatatgaagatatgaaacaggtgctgaaacagttttcaggtgtgccggtcaatcaattcattttcacgaaaacggatgaaaccgcctcactcggctccgtgtttcaagtgctgtcggaatcaagaatcggcgccgcctatttgacaaatggacaggatgtgcctgaagacatcctatcggcttcaccaaaagagtttgtaaggatgcttttgacatgaaacccgatcaggcagagtcattaagaaagaaaatgagagagcggcaaatgatcaagccggagctttatgtgaaaaaagcgaagacattagccgtcatcagcggtaaaggcggcgtcggaaaatctaatttaacattaaacatggcagttgccctgcaggaaaaaggaaaaaaagcactcatcattgatcttgacatcggaatgggcaacattgatgtgctgatcggcgctgcttcttcccgcaccattattgatgtgatggagaatcggcacgcgttggctcaatcactttcctccggtccgaaaggccttcgctacatatccggcggaacggggcttgaggcgatctatcaagcagacggagagaagtggacggcttttatgaatggtctttccgctgtattaagcgattttgattacgttctgtttgatatgggagcgggactttcaaaagaacagctgccgtttattttatcggcggaagacattctcgccgtgacaacgcctgagccgacggccattatggatgcctacagcgcgatcaaacatcttttgctcgcggatgaacggctgaccgtaaacattgccgtcaatcgcgcccgcgcccaaaaacaggcgctggacacgtacaaccgcctttctcatgcgattcacacgtttttaggcgcaggggtgcgtttcgccggctccatacccgatgacccgctagtaagtcaagccgtcattgaccaggtgccttttttaataaaaagtcctcaagcaaaagccagcaggtccgtccgtcttctgacggatgtcttgtttcaaacggaagaaaacaaaccaagagaagagaaaccggcatttattgagagattatcttcttttttattgaggaggactttacagtgattcgtgtgcttgtcgttgatgactcagcttttatgagaaaaatgattaccgattttctggctgcggaagtgcagatagaagtcatcgggacagccagaaacggggaagaggcgctgaagaaaatagagcttcttaaaccggatgttgtcacgcttgatattgaaatgccggtcatgaacggaacggatacattgcggaagatcatcagcatatataaacttcccgtaatcatggtatcgagccagacacagcaagggaaggaccgaacgatcaactgtctggaaatgggcgcttttgattttatcaccaagccttccggagcgatttcacttgatctttataaaattaaagagcaactgattgagagggtgattgcagccgggctgtcccgcgcacaaaaacctgaggcggcagtgaaagagtcttctatcccggaacgtccggctttggcgggatttgaaagaccgaaagcaaaatccgccaagcaggccgtattcatcgcgacctctacaggcggaccgcgggctctgcaaaaggtgattccgaaactgccgaaggatttaaaggcgcctgtatttgtcgttcagcacatgcctgaaggcttcaccgcttcacttgcagacagactcaaccatttgtcagatattcaggtcaaagaagcggaaaacggtgaagaagcgaaagacggatgggtgtacatcgcgcccggcggaaaaaatatgacggttgcagaggaaggcggaaggctccgtatcattcttgacgttcatgatacggaaagccggcataaaccgtcagccgattatttgtttcggtcggcaagccgcttatccgattacgaaaaggtagccgtcattatgacaggcatgggcagcgacggaaccgagggcttaaaagaaatgctcagaacaggcggcgttaaaacgattgcggaatcggacgaatcctgtgttgtgttcggaatgccgaagtcagcgataaaggcgggcctcattcatgagattaaacatgtggaagatatcgcggcatccatcaccggatgtgtgaaaaaagagagggtgtgaatcaattggatatgaatcaatatttagatgtctttattgatgaaagtaaagagcacttacagacatgtaacgaaaagctgctgctgttggaaaaagatccggcagaccttcagcttgtgcatgacatcttcagagctgcccatacgctgaaaggcatgagcgcaacgatgggatatacagatctggcgcatttaacccacctgatggaaaatgtgctggacgctatccgcaatggagaaatgccagttacatcggattggctggacgtgctgtttgaagcgcttgatcatcttgaagagatggtgcagtccattattgacggtggagacggcaaacgtgatatttctgaagtgagtgcgaagctcgacgtaaatgcggtgcatgagactgcggcttcagccgaaacagcagaaccgccggcttcaaaacaacaggcttcaactgaatggaattatgatgagttcgaacggactgttattgaagaggcggaagagcaaggattcagccgctatgaaataacggtttccctgaatgaaagctgcatgctcaaagccgtgcgcgtgtacatgatatttgaaaagctgaatgaagccggggaagtcgcaaaaacgatacccgccgcggaagtgcttgagacggaagatttcggaacggattttcaggtgtgtttcttgacaaagcagcctgctgaagaaattaaagaactcatcagcggcatttcagaagtggagaatgtcgaaatttctgccggggcgccgttaaaaacggccgaaaaaccgcaagcggctgaaccgttgaaggaagctccggttaaaaaggctgagaaacagcctaagccgcaagcgaaaacggaagaacagccgaagcatcacagcggctcgaaaacgattcgcgtcaacattgaaagactggattcttcaatgaacctttttgaagaacttgtcatcgaccgcggacgtcttgagcagatcgccaaggagcttgaccacaatgagctgactgaaaccgttgaacgcctgaccagaatctcgggcgaccttcagtctattattcttaatatgaggatggtgccggtagaaactgtctttaaccgtttcccgagaatgatccgccagcttcaaaaggaattaaacaagaagatcgaattgtccatcatcggagctgaaacggagctggaccgtacggtgattgatgaaatcggcgatccgcttgtccatttaatcagaaacagcatcgatcacggcattgaatcgcctgaagtgcgggtgaataaaggaaaaccggaatctggccatgtcgtgcttaaggcatatcacagcggcaaccacgtctttatcgaggttgaagatgacggggccggcctgaacagaaagaaaattcttgaaaaagcgctcgagcggagtgtaatcaccgaacgcgatgctgaaacgcttgaagataatgagatttacgagcttatttttgctccgggcttctcgactgccgatcaaatttctgacatttcagggcggggcgtcggcctggatgtcgtaaaaaataaactcgaatcactcggcggctctgtcagtgtcaaatccgcggaaggccaaggttctcttttcagtatccagcttccgctgacactttcaattatatccgttcttctcattaaactggaagaagagacgtttgcgataccgatttcttctattatagagacggctgttattgataagaaagatatcctgcagacgcatgacagagaagtgattgatttcagaggccaaatcgttccgatcgtctatctgaaaaaagaattcggcattacggattcaaaacaggatgccgatcagttccatgtaatcgttgtgaaaaagggcgataaatccactgcttttgtcgtggactcttttatcggacagcaggaagtcgtactgaaatcactcggcgactatttaacgaacgtttttgcgatttccggcgctacgattctcggaaacggagaagtggcgctgattattgattgcaatgcgctgatctactaaaacgacacgaggaggtgcccgcatgactgctgaaatcaaaacaggtgaaaaaatgattgtgtttatgataaacgggaaagaatacgctatctcagtttcccaggtgaaatcaattgaaaagtggcaaaaaccgacgaggatcccgggtgtggaatcttatatccgcggcgttatcaatctgcgcggagtgattaccccggttcttgatttaagaaaacgtctgaatcagcctgaacaggacatcacagaagagactcggattatcatcatttcttaccgtgacgctgatgtcggatgggtcgtggatgaggccaatgacgtcatcaccgtgcatgaaaatgaaatcgaatcagcgcctgaaagccagacaaaggaaacggatgtgtggattaaacagatcgtcaagcaagataacaggctcctcaatattatcgatgcgcatgcggtgctggataaaggtgcttcggcatctgcgtccggagagcctaatgcttaaaggggaaaagacaacatgagtaagtttgaagcgatcaaagaagagcagatggatattttgcgggaagtcggaaatatcggggcgggtcactcggcttctgcaatggctcagctgctgaacagaaagatagacatggaagtgccgtttgcgactttattgacatttgatgagctcgctgattttttcggcggggctgaaacgccggtcgccagtatctttttaagaatggaaggcgacatgaccggctctatctttctcatcatgcctttccatcaggcggaacagtttatcagagagctgatcgggaatccggattttgatattgaccagttgggcgaagatcatttgagttcttctgctttacatgagttcggcaatattttagcaggttcctatttaacggcattggctgatttgacgaagcttgagatttacccgagcgtgccggaaatctcacttgatatgttcggcgcggttatcagtgaagggctgatggagctcagccaagtcggagagcatgccattgtcgtggatacttctatttttgaccagggcagccggcaggagctcaaagctcacatgtttatgctcccggactatgattcttttgaaaagctcttcgtctcattgggtgcggctttatgagccgtgcggaagccgcagtcgttaaagtggggattgcggatgttcaagtcgcgcgttacccggataaaatccggacctcgggactcggttcatgcgtggggctggttttatacgataaagacaaacaaacggcaggactcgttcacgtcatgctgccggactccggtttatcaaaaacagcggagctcaaccgtgcaaaatacgcggacaccgccgttaagatgacgattgatatgcttttgaaagccggctgccgcaagtttgccctgaaggcaaaactcgccgggggagcggagatgtttaagtttaaaatgacgaacgacctgatgaaaatcggtccgaggaatgtagcggccatcaaagagcagctttcattgtataacattccggtcatcagtgaagatacgggcggctcaagcggccggacgattgaatttgagccaaagtcctgcatgctgcacattcgaactgttaaacaaggtgaaacaacgatttaataaaggtatgaggtagggggataacaatgcaatccttgaattatgaagatcaggtgctttggtcgcgctggaaagagtggaaagatcctaaagccggtgatgatttaatgcgccgttacatgccgctggtcacatatcatgtcggcagaatttccgtcggactgccgaaatcggtgcataaagacgatctaatgagccttggtatgcttggtttatatgatgccctggaaaaatttgacccccggccgggatttaaaatttgatacctatgcctcgtttagaattcgcggtgcaatcatcgacgggctgcgtaaagaagattggctgcccagaacttcacgggagaagacaaaaaaagtcgaagctgcaatcgaaaaacttgaacagcgctaccttcggaatgtgacgccttcagagatcgcagaagagctggggatgacggagcaggacgtagtatcaacgatgaatgaagggttttttgccaatctcttatccattgatgaaaagcttcacgaccaggatgacggtgagaatattcaagtgatgatcagagatgacaaaaatgtgccgccggaagaaaaaatcatgaaggacgagctgatcgctcagcttgcgggcaaaattcacgagctctctgaaaaagagcagcttgtcgtcagtttattctataaagaagaactgactttgaccgaaatcggacaagtcctgaacctttcgacgtcgcggatttcacagattcattcaaaggcgctgtttaaattaaagcacctgcttgaaaaagtaattcaataatgaactcatggttagcgagtgaaaaacatgtcaacactattatggcttttaagctttgtgcttcacggcgtactgctttatgccgtcattattctgtacacgaggttttcagccctcaaggagacggagcgccagcagaagaagattcttgaagagacggaaaacacccttgcagcgtttctgcttgagctgaaagaagaaaatgaaagactcgaagacgcaaaaagccgtcaagcgccggacgcagaagacgccgaaccccggccggaaccgaaagaagagcctgatattccggaccacatggaaaagcttatcagtgcaacggaacgggctgaaagtgacgaaaacaggggcgcgcattcgtttgaagaacgtgtttcagaattatatgaacaagggctcacccccgcggaaatcgccaaacggatgcagagcggaaagacagaaatcgagctgtttttaaaatttcgcggcaaagctgtaaaggattcttgattgtcgcataaagctgtgttatattatgtcttggtgttaaatacacacgcttaacgatttatgcagagggtgctgcaaacggcagttctgcacaaaaatgacctaagcggaggaaaaaaaccattttattaggaggaaatcacatgtcagttatttctatgaaacaattgcttgaagctggtgttcacttcggccaccaaacacgccgctggaacccaaaaatgaagcgttacattttcacggagcgtaacggaatctacatcattgaccttcaaaaaacagtgaaaaaagtagaggaagcttacaacttcacgaaaaaccttgctgctgaaggcggaaaaatccttttcgtcggcacaaaaaaacaagctcaggattctgttaaagaagaagctgtacgctctggcatgtactatgtcaaccaacgctggttgggcggtacactgacaaacttcgaaacaatccaaaaacgcattaagcgtctgaaagacatcgagaaaatgcaagaaaacggtacatttgaagtacttccgaaaaaagaagttgttcaattgaaaaaagaattagagcgtcttgaaaaattcctcggcggaattaaagacatgaaggatcttcctgatgcattattcatcatcgatcctcgcaaagagcgcatcgctgttgcggaagctcacaaattgaacattcctatcatcggaatcgtagatacaaactgtgatcctgatgaaattgatgtcgtaatccctgcaaacgatgacgcaatccgcgctgtcaaacttcttacttctaaaatggcagatgctattcttgaagcgaagcaaggcgaagaagaagcggaagctgctgaagagactgcacctgaaacagaaacgacaactgcgtaacctaatcaaaaggtgataagagggactgccttttatcaccttttttcaagaaaaatgtatctatacatatcttgtttacacatataaggaggaattcaaatggctattactgcacagcaggtaaaagaactgcgtcaaaaaacaggcgctggtatgatggactgtaaaaaagcattgactgaaactgacggagatatggacaaagcaatcgaccttctgagagaaaaaggaattgcgaaagcggctaaaaaagctgaccgtatcgctgctgaaggttctactcttattaaaactgacggcaacaaaggcgttatcttagaagtaaactctgaaactgatttcgttgcgaaaaacgaaggcttcaaagagcttctgaacacgcttgctgaccaccttcttgcaaacgctcctgctgatcttgaagaagcgatgggtcaaaagatggaaaacggttctactgttgaagaatacatcacaagcaacgttgctaaaatcggagagaaaatcactcttcgccgttttgctgttatttcaaaagaagacagcgaagcgttcggtgcttaccttcacatgggaggccgcatcggcgtattatccgttcttagcggaacaactgacgaagatcttgcaaaagacatcgcgatgcatgttgcagcggtaaaccctcgttacatttcccgcgaccaagtgtctgaagaagaagcaaaccatgagcgtcagattctgactcagcaagctcttcaagaaggcaaaccggaaaacatcgtagctaaaatggttgaaggccgtctgaataaattcttcgaagaaatttgcttattagaccaagctttcgttaaaaacccagacgaaaaagtgaaacaagttgtggctgcgaaaaacgcatctgttaaaacttacgtccgctacgaagttggagaaggtattgaaaaacgccaagaaaactttgctgaagaagttatgaaccaagtgaaaaaataatggcggaaagccttggcgaatctttcgcggcttttcaggcagtataggggacactacttgtgttccctatttttaaaactatatttacaaacctttttttctcttgcataataggaaacggcaatgtttacacttggaggttattatggaaaaaccaaaatacaatcgtatcgttttaaagcttagcggagaagcattggcaggagagcagggaaacggcattaatccgactgtcatccaatccatcgctaaacaagtaaaagaaatcgctgagcttgacgtcgaagtggccgtagtcgtaggcggcggcaacttatggcgcggaaaaacgggcagtgacttaggaatggaccgtgcgacggccgattatatgggcatgcttgctactgtcatgaactcacttgccctgcaggacagcctggaaacgctcggaattcagtccagagtgcagacatcaattgaaatgcgtcaggtcgctgagccttacatcagaagaaaagccatccgccacctggagaaaaaacgcgttgttatttttgccgcgggaacaggaaacccttatttctctacggacacaaccgcagcgctgcgtgccgctgaaatcgaagcggacgtgatcttaatggcgaaaaataatgtcgacggtgtgtataatgctgatccgagaaaagatgagtcagccgttaaatacgaaaaattatcttatctcgatgtgttaaaagacgggctggaagtcatggattctacggcttcttcactatgtatggataatgatattccgctgatcgtcttttctattatggaagaaggaaatattaagcgtgccgtaatcggcgaatcaatcggaacgatcgtaagggggaaataacgttgtcaaacgaagtattaacacaaacaaaagaacgcatggaaaaagcggttgccgcttattcacgcgaattggcgtcagtccgcgcaggacgtgccaacccatctctattggataaagtgacagtagaatactacggtgcccaaacacctttaaaccagctgtcttccatcaatgtgcctgaagcgcgtatgcttgttgtcacaccgtatgacaaaacggcaatcggcgatattgaaaaagcgatcctgaaagctgatcttggcgtaacgccgacaagtgacggcacaattatccgcatcgcgatcccggctctgacggaagaaagacgtaaagaacttgtcaaagtcgtgaaaaaatacgcggaagaagcgaaagtagcagtccgtaatgtccgccgtgacagcaacgatgacctcaaaaaacttgagaaaaacggagacattacagaagacgagcttcgtgcttccagtgaagacgttcaaaagctgacagatgaatatgtgtcaaaaattgacagtgtcacaaaggacaaagaaaaagaaatcatggaagtttaatgaaaaactatgtacaatagataatgtgaaaagaccctctcatgtttacagggggtttttttgttaatactgttgattacattgatcatcagcaacgcaacctttttgggtgacggaggaatctcatgctcaacatactcaaaaattggaagaatcagcagaatgcggcttccaacttagaacggtatacaaaagaagacatactgaagggtgaaattcccgcacacattgccattattatggacggaaacggacgctgggcgaagaagcgctcactccctcggattgcaggacatcatgaaggaatgaaagtggtaaaaagggtgacaaagctcgcaagtcagctcggcgttaaagttctgactctttatgcgttttcaacggagaactggaagcgcccgaagatggaagtcgactttttgatgaagcttccggaagagttcctgaatacgtatcttcctgaattaatagaggaaaatgtacaggtgaaaattatcggagatgaatccgcgctcccttctcatacgtacagggcgattgagaaggccgtaaaagatacagaacaaaatgacgggctgattctcaatttcgctttgaactacggcggacgcacggaaatcgtcaatgcggcaaaagccctggctgaacaggtgaaaagcggcacgctgaatatcgaagacattgatgaagcgctcttttccgggcatttaatgacagaatcactccaggacccggagctgctcatcagaacgagcggagaaatcagattgagcaactttatgctttggcaggtggcttacagtgaatttgtttttacagatgtcctgtggcccgattttaaagaagatcactttctgcaggcagtgggagaatttcagcagcggggccggaggtttggcggaatttagaggatggtggaaatgaaacaaagattgttaacaggtgttctggcagcggcactatttttatttttggttattttcggaggattgccgttcaccgtatttgtttacgtgatgggaagtatagcgctttttgagcttttgcggatgaaaaagctcagatttttttcttttccgggtctgatcagcctcttgttgttatggctgtatatgatgccggacaagtatcattttttcgatgcgaaaatggaagtaacgattttcgccgtattgattctgctcagctatacggtgctcgtgaaaaacacctttacgtttgacgaagtcgggtttatcgttctcgcgacggtatatatcggactgtgttttcattattttattgaaatcagaaacattgaaacaaacgggcttttgtatatcttttatgcctgcgttgtcatatggtcaacggactcaggcgcatatttcgtcggaaagtcgctcgggaagcggaagctgtggcccgaaatcagtcccaacaaaacagtcgaagggtttctcggcggtattgtcatcgcccttattttcacggctgtttttcagctgtttgcgcaccttccgatttcatacccggttcttttggtcatcacgcttgttctgtctgtgttcggacagatcggggatttggttgaatcagcgcttaagcggcactatgatgtgaaggattcgggaaaaatccttcccgggcacggcggcattttagatcgatttgacagctttttgtttgtcatgccgttcttatactttctgcttgcgcttttttcatgagaaaggctaatatgaaaataagactgatctggacgcatagaatgggagtggcattttgaagaatatttgtcttttaggagcaacaggatcaataggggagcagacgttagacgtattgcgcatgcatcaagatcagttccgtctcgtctcgatgactttcggtaaaaacgccgagaaagcgatcccgttgatcagaacgtttcagccgaaatatgtagcagtcggcgacatggatacataccaaaaagtgaaagaagtgtctttttctcatgactgtcaaatcggcatcggagaagaaggcctgattgaagcggcagtcatggacgaagtggatatcgtggtcaatgcgctgcttggaagcgtcggtttaatcccgactttgaaagcgattgaacagaaaaaaacaattgcgcttgcaaataaggaaactctcgtcactgccgggcatatagtgaaaggacacgcaaaacgatacggtgttcctcttcttccggtcgacagcgaacattccgctatttttcaggcgctgcaaggcgaacagagcaaaaatatcgagcgcctgatcattacggcatccggcggcagtttcagagataaaacgcggcaggagcttgagtctgtaacgattgccgacgcccttaaccacccgaactggtcgatgggcgcaaaaattacaattgattcggctacaatgatgaataaaggacttgaagtcattgaggcgcattggctgtttgacattccgtatgaacagattgacgttgtattacataaggagagcatcattcattcgatggttgaatttcacgacagaagcgtcatcgcccagctcggaaatccggacatgagggtgccgattcaatatgcgctgacatatccggaccggctgcctctgcctgaaacaaaaaggcttgaattatgggagatcggaagcctccattttgcgaaagctgactttgaaaggttccgctgcttacaatttgcctttgaatcaggtaaaatagggggaacaatgccgacggttttaaatgcggccaacgaagaagccgttgccgcttttcttgccggacggatttcattcttatcgattgaggacctgattgaaaaagcattggaccgccacagcgtaattcaggatccgagtcttgcggatatccaagaagtggacaaagacacccggggatacgttaattcaatactcacataaggtggtatgttcgtgaatacagttatcgcgtttattattattttcggaacgctcgtttttttccatgagctggggcatttattgctcgcccaaagagcgggaatcctttgccgtgaatttgcgatcggcttcggccctaaaatcttttcatttaaaaagaatgaaaccgtgtatacgatcagactccttccggtcggcgggttcgtccgcatggccggtgaagacccggagatgatcgaggtcaaacccggttatactgtcgggcttctttttaataaagatgacgaagtggaaaaagtcatcattaatcaaaaggaaaaatatcccgacgctttaattatcgaggtggagacggctgatcttgagcacgaaatgaagattaccgggtacgagcaggggaaagaagatgaactggcgggctttactgtcagtcagacctccttttttatcgtagacggagaagaagtgcagattgcgccttacaatcgacaattcgggtctaaacccgtatggaagcggattaaagcgattgctgccggtccgataatgaacttcatcttagcgtatgtcattctcgtcatgcttggattcattcaaggcgtgccttcgaatcagcctgagctcgggaagctgacagacaatggacgcgcagcggctgccggtttaaaagaaggcgactatatccagagcattaacggtgaaaaaatgaggtcatggacagacatcgtgacagcggtaaaagaaaatcccggaaaaaaaatcgatgtcgccgtcaaacgggacggcaaatcgtttcatatctcggttacacctgaagctgtaaaagatgaaaataaaaaaacaatcggccgcttcggctcttatgcgccgactgaaaaaggcgcgcttgcagcgatcgcctacggcgcgacatctaccgttgatgtcacaaaagcgattctgaccaatctgagcaaacttgtgacaggccagtttaagcttgatatgctttcgggtcctgtcggcatttatgatatgacggatcaagttgcaaaaaccggtattatcaacctattccagtttgcggcgtttttaagcatcaacctgggaattgtcaacctgctgccgataccggcgcttgacggcgggcggctgctgtttttattcattgaagcaatccgcggcaagccgataaaccgtgacaaggaagcatttgttgtatttatcggcgtagctttcttaatgcttcttatgctggttgtcacatggaacgatatccagcgtttattcttataattgactagtaaaaaatcagaggtgcgaagacatgagacaaagtttgacgcttattccgaccctgagagaagtgccggctgatgctgaagcaaaaagccataagcttctgctgagagcgggatttatcagacaaaatacgagcggggtttacagctacatgcccctggcttacagggtcattcaaaacattcagaagatcgtgcgtgaagaaatggaaaaaatcaacgcggtggaaatgctgatgccggcccttcagcaggctgaaacatggcaggaatcaggcaggtggtatacgtacgggcctgaattaatgcgtctgaaagaccgccacggccgtgaatttgctttaggcgcgacacatgaagaagtcattacttctctcgtgcgcgatgaggtgaaatcttataagcgtctgccgctcactctttaccagatccagtctaaattcagagatgaaaaacgcccgcgtttcgggttattacgcggacgcgaattcatcatgaaagatgcgtattctttccatgcttctgaagaaagtctggaggaaacataccaaaacatgtacggcgcatacagcagcattttcgcacgctgtgaattaaatgtccgtcccgttattgccgactcgggcgcgatgggcggaaaagacacgcatgaatttatggctctttctgaaataggggaagataccatcgcttattccgatggatcctcttacgcagccaatacggaaatggcggaagttgtcatgaacagcgagccgtcagatgaaacacccgaggcattggagaaaattgatacgccgaatgtcaaaagcattgaagagctcgcttcgttcttgcagatcgagccgagcgcctgcatcaaatcaatgctgtttaaagcggatgaccgatttgttctcgtgttagtaagaggcgatcatgaggtcaatgacgtgaaagtgaaaaaccttctgaacgcggaagtggttgagcttgcgtctcatgaagaagtagcagagaaacttggcacggagccgggatttgcggggccgatcggcgctgccggcgacattgagatttatgccgaccaagccgtaaaagtaatggtaaacgccgttagcggcgcgaatgaaaaagaccgtcattaccgaaacgtaaacatcgaacgtgacgcgtcagtaaaagcatatgccgatcttcgaatcattcaggaaggcgatccgtcacctgacggaaaaggcacgatccgtttcgctgaagggattgaggtcggacaagtctttaaactcggcacgcgttactctgaagcgatgaatgcgacataccttgatgagaacgggcgtgcgcagccgatgctgatgggatgttacggaatcggcgtgtccagaacgctttcagccatcgctgaacagcatcacgacgaaaaaggcttgatctggccgaaaagcgttgctccgtatgatcttcatattttggcgctgaatatgaaaaacgaagcgcaaaaagagcttgctgaacagctttacggcaaattccaggcggaaggttatgaggtattatacgatgaccgcgctgaacgcgcaggcgtgaagtttgctgattctgatctgatcggccttccgatccgcatcactgtcggaaaacgtgccgatgaaggcatcgtagaagtgaaaatccgcaaaaccggtgaatctgccgaagtttcagtggatgagctttctgaatttatcaagacgaagtaatcaccataacgaatcatacaaaatcatgttaaaatagagaaaaaagaaggtacctcatcacctgcggaggtaccttcacttatgatgttttaagggagggatactgtctgaatggaacagttatcagtaaacagaagacagtttcagattcttctgcagcagcttaatatgacagatgataccttcatgacatactttgaagacggagagattgataaactgacaatccataaagcagaaaaggcctggcatttccaatttcgctttaaggctcttctgccgtatcaaatatatgattcattcatgatgaggttaacacaatcgtttgctcacatcgcccgtgtcacatcgtctgttcaggtcatcgaccctacagtgacagaggagcttgtacaggattattggacacgctgtattgaagagcttgaaggaacctcgccgccgatggtggctcttttgaatcagcagaagccgaagctcaagggaaacaaactgatcgtgaaaacaaaaacagatacagaagcatctgcgctcaaaaataaatacagcgcgctgattcagcacagctaccgccaattcggctttccggaactgcagctggataccgaaattttcgtatctgaccaagaagtccagaaattccgcgagcaaaagcttgctgaagatcaggagcgggcgatgcaggcgcttatcgagatggagaagaaggaaaaagagggcgatgaggatcaggcaccgtccggaccgcttgtcatcggctatcaaattaaagagaacgaagaaatccggacgcttgacagcatcatggatgaagaaagaagaattacggtgcaggggtttgtgtttgatgctgaaacacgcgagctgaaaagcggacgcacgctctgcattttcaaaatcacggactatacaaacagcattttagtaaaaatgttcgccagagaaaaagaagacgccgctttgatgaaaacgctgaaaaaaggcatgtgggtgaaggcgcggggaagcattcaaaacgatacattcgtcagagacctcgtcatgattgcaaatgacgtgaatgaaataaaagccaaaacccgtgaagacaccgctcctgaaggcgaaaaacgggttgagcttcatctgcattctccgatgagccaaatggatgctgtaacgggcatcggaaagcttgtcgaacaggcgaaaaaatggggacatgaagcgattgccttaactgatcatgccgttgtgcagtctttcccggatgcctattccgccgcgaaaaaacacggcattaaaatgatttacggaatggaagccaatatcgtagatgacggcgttccgatcgcatacaatccagctcaccgtctactggaagaagacacatacgtcgtctttgacgttgaaacgacaggtctgtccgcagtgtatgacaccatcattgagcttgccgcagtcaaaataagaggcggagaaatcatcgataaattcgaagcgttcgccaatccgcaccatccgctgtcagcaacgacgatagagcttaccgggattacggacgacatggtccgcgacgctcccgatgtcgttgacgtcgtacgggattttaaagaatggatcggcgatgacgtgcttgtggctcataacgccagctttgatatgggatttttaaatgtggcgtacaagcgtcttttgaaaacggaaaaagcgaaaaatccggtcattgatacgctggaactcgcgcgtttcctgtatcctgagtttaaaaatcaccgcttaaatacgttatgtaagaagtttgatatcgaattaacccagcatcaccgagcggtctttgacgctgaagcaacgggctacctgctgttgaaaatgctcaaagatgccgctgaaaaagacattttttatcatgatcagctgaatgagaatatgggacaatccaatgcttatcagagatcaagaccttatcacgctacattgcttgccgtgaatgagaccggccttaaaaatctgtttaagctcgtgtccatttctcatattcaatatttctacagagtgccgcgcattccgaggtcgcagcttaataaatacagagaaggtctgttaatcggctctgcctgtgacaggggtgaggtctttgaaggcatgatgcaaaaatctcctgaagaggttgaagatatcgcatccttctatgattatcttgaagtgcagccgccggaagtatacagacaccttctgcagcttgagctcgtccgagatgaaaaagcgctgaaagaaatcatcgccaacattacgaagctcggagaaaaattgaataagccggtcgtggctacgggaaatgtccactatttaaacgatgaggataaaatttaccggaagatcttaatatcttcccaaggcggcgccaacccgttaaacagacacgaactgcctaaagtgcacttcagaacgacagatgaaatgctggaggctttctccttcctcggtgcggaaaaagcgaaagaaatcgtggttgacaatacgcagaaagtcgcttcgatgattgatgagatcaaaccgatcaaagacgatctgtacacgccgaaaattgacggggctgatgaagaaatccgtgaaatgagctatcagcgcgccagaagcatttacggtgaagagcttcccgaaattgtggaagcgagaatagaaaaagaattaaaaagtatcatcggtcatggattcgccgttatttatctcatctctcataagcttgtaaaacggtctctggatgacggttatctcgtcggctcccgggggtccgtcggttcatcgcttgtggcgaccttaacggaaatcactgaagtgaacccgctcgctccgcactacgtgtgcccgagctgccgatattccgaattctttaatgacggatcagtcggttccggttttgaccttccggataaaagctgcccgtcttgcggcacccctttgaaaaaggacggacatgatatcccgtttgaaacgttcttaggctttaaaggtgacaaagtacccgatatcgacttgaacttctcaggtgagtaccagccccatgcccataactacacgaaagtattgttcggtgaagataacgtgtatcgcgcgggaacgattggcaccgtcgcggaaaagacggcttacggatatgtgaaaggctatgcgggcgatcacaacctacacatgcgcggcgcggagatcgaccgtctggtgcaaggctgcaccggcgttaagagaacgaccggccagcacccgggggggattatcgttgtcccggattacatggatatttacgatttttccccgatacaattcccggcagatgcgacggggtctgaatggaaaacgactcattttgacttccactccattcatgacaacctgctgaagcttgatatattggggcacgatgatccgacagtcatccggatgcttcaggatttaagcgggattgatccgaagacgattccgacagatgatccggaagttatgaagattttccaaggcacagaatcgctcggtgttactgaagagcagatcggctgtaaaacggggacgctcggcattcctgaattcgggacgcgatttgtgcggcagatgcttgaggatacgaagccgacgacgttctccgagcttgtccagatttccgggctttctcacggaacggacgtatggctcggcaatgcgcaggaactgatacacaacaatacgtgtgaactgagcgaagtgatcggctgccgtgatgacattatggtttacttgatctatcagggccttgagccttcactggccttcaaaatcatggaattcgtccgtaaaggcaaaggcctgacgccggaatgggaagaagaaatgaaaaagaacaatgtgccgaactggtatattgattcatgcaaaaaaatcaaatacatgttcccgaaagcccacgccgccgcatacgtgctgatggcggtgcggattgcctattttaaagtgcatcacgcgcttttatattatgctgcgtattttaccgtccgcgcagatgactttgacattgatacaatgattaaaggctcgaccgccattagagcggtgatggatgatatcagctctaaagggcttgatgcttcgccgaaggagaaaaaccttcttaccgtgttagagcttgcgcttgaaatgtgtgagcgcggctattccttccagaaggtcgatctataccgttcgagcgcttcggaatttatcattgacggcaacagtctcatcccgccgttcaactcaattccgggactcggaaccaacgccgctctcaatattgtgaaagcgcggaaagaaggggagttcctttcaaaagaggatcttcaaaaacgcggaaaagtgtcaaaaaccattttagagtatttagaccgtcacggctgtcttgagtcgcttccggaccaaaatcagctgtctctgttttaagctttgtgcacagcctccgagcggagtttgatttgcattaaatatatggttatggtatagttttattggaaatgctaacgattaccgaggcaaagagtggggaaacccgctcttttgtattgaacaggcaattttgcctcgacatgtccatcgttttctcaatgcccctgctctttagaagcagggtttttatgcagaggaacggctgatatgatatcgacagcacaaggaggaaaaacatgagcaaaaaagtgactgataccgttcaagtaatggctcagcccatactggatgaccttcagcttgaactcgtagacattgaatttgtcaaagagggtcaaaactggttccttcgcgtgtttattgattccgagaacggtgttgatattgaggagtgcgccaaagtcagcgaagcattaagcgaaaagctggatgaggccgatccgatcacccagaactactttcttgaagtatcttctcctggagccgagcgtccattaaagaaaaaagccgacttcgaaaaatcactgggcaaaaatgtgtacatgaaaacgtacgaaccgattgacggtttaaaagtgtttgaaggcaaattggctgaattcgatggacaaactgttacaatagagatgacggtcaaaacaagaaagaaacgggtcaatattccgtatgaaaaaatagctaacgcaagattagctgtaacattttaatgaatgaagtattagtgtttaaggggggagaccgctaacatgagcagtgaactattagatgctctcactattcttgaaaaagaaaaaggcatcagtaaagacattatcatcgaagcaattgaagctgccttaatttccgcgtacaagcgaaattttaaccaggcgcaaaacgtacgggtcgatctgaaccgtgagacgggcacgatccgcgtgttcgcaagaaaggatgtcgtagacgaggtatacgattcaagacttgaaatctcgcttgacgacgcccagcacatccatccgaactaccttgtcggagatgtcgttgaaatagaagtaacgccgaaagacttcggccgcattgctgcgcagacggcgaaacaagtggtgacgcagcgtgtccgtgaagctgagcgcggcgtgatttactcagaatttatcgatcgtgaagaagacatcatgacgggaattgtacagcgcttagacagcaagtttatttacgtgtctctcggcaagattgaagcgctgctgcccgtcaatgaacaaatgccgaatgagagctataaaccgcacgatcggattaaagtatttatcacaaaagtcgaaaaaacgacaaaagggccgcagatctatgtatcaagaacgcatcctggtctgttgaagcgtctttttgaaatcgaagtgccggaaatttatgacggaacggtcgaactgaaatccgttgccagagaagcgggcgaccgctctaaaatctccgtccgcactgatgaccctgacgttgatccggtcggttcatgcgtcggtcctaaaggccagcgcgtgcaggcgatcgtcaatgaactgaaaggcgaaaaaattgatatcgtcaactggtctgatgatccggttgaatttgttgccaatgcgctcagcccgtctaaagtgctggatgtcatcgtcagcgaagaagaaaaagccacgactgtcatcgttcctgattaccagctttctctggcaatcggaaaaagagggcaaaacgcccgcttagccgcgaaactgacaggctggaaaatcgatatcaaaagtgaaacggatgcaagagaccttggcatctatccgagagagcatgaagaagatgacgatttagagccgctctttatggagcctgaaacagccgaatcggatgaataagaggtgattttaggtgaataagcgaaaaaaaattcctctgcgcaaatgcgtggtaacgggggaaatgaagcctaaaaaggaactgatccgaattgtccgttctaaagaaggagagatttcagtcgatccgaccggaaagaagaacgggcggggtgcctatatcacccttgagaaagaatgcatcttagctgcgaaaaagaaaaacacattgcaaaatcaatttcaatcacaaatcgatgaccagattttcgaagaattgctggaactggcggaaaaggtgaaaaaataacatgtctggaatggaatggtttcccttgctgggtctggccaatcgagctcgtaaggtcgtgtcgggcgaggacttggttataaaagaaattagaaatgcgcgtgcaaaacttgttctgctgacagaagatgcatctgcgaatactgcaaaaaaagtatccgataaatgcaattattataaagtgccttataaaaaagtcgaaagccgcgcggatctcggccgctctatcggcaaggaatcacgtgtcgttgtcgccgtcactgaccaaggttttgcgaataagctgatcagcttgctcgattaatatttttgggggtgaacgaatggctaaaatgagagtttacgaatatgcaaaagccatcaatgtttcaagcaaggaaattttgactgcgctgaaaaacatggatatagtagtaaataaccatatggcaatgcttgaagaaaagaccattaagcagcttgatgcgaaatttaaaaaaggcggcgccggcgttacatctcagaagcctgcggaaacgaacaaaaacaagccgcaagggattaatcagcagcctgctgggaatcaaccaaacaaaattcgagacggaaagaagaatgacgtgcagaataatcaatttaacaaaaacaagaagaacaacaacaacaacaaaaacaaaaacaaacgcaatcataacaacaaaaatcagtatcagcaaaaaccgctgaagccgaaaaaagagcttcctgagaaaattacgttttccggctctttaacagtcggagctttagccgaggaactgggcaaagagccgtctgaactcattaaaaaactgatgcttctgggcgtaatggctacgattaaccaggagcttgacaaagacacaatcgaactgatcgcatctgaatacggtgtggaaacagaagaagtgattgtgcttgaagaaactgagcttgaaaaatatgaagaggctgacaaagaagaagatcttcaaatccgtccgcctgtcgtgacgatcatgggccacgttgaccacgggaaaacgaccctccttgacagcatcagaaaaacaaaagttgttgaaggtgaagccggcggaatcacccagcatatcggggcttaccagatcgaagaaaacggcaaaaaaatcacgttcctagatactccaggacacgcggcgttcacaacaatgcgtgcgcgcggtgcggaagtaactgatattaccattttagtcgtagcggctgatgacggcgttatgccgcaaacagtcgaagccatcaaccatgcgaaagcggctgaggttccgattatcgttgccgtgaataaagtggataaagaaagcgcgaaccctgaccgtgtcatgcaggagctgactgaatacggactcgttcctgaagcatggggaggagaaacgattttcgttcctctgtccgctcttacaggcaagggaattgacgagcttgtcgaaatgattctgcttgtcagtgaagtggaagagctgaaagccaatccgaaccgtcaggcaaaaggaacggttattgaagctgagctcgataaaggaagaggatctgtcgcgacacttctcgttcaaacgggaacattgaatgtcggagatccgatcgttgtcggaaatacattcggccgcgtgcgggccatggtcaatgatctcggccgccgcgtgaaaacagccggaccgtccacacctgtagaaattacgggcttaaacgacgtaccgcaggctggcgatcaattcctcgtctttaaagacgaaaaaacagcccgttctgtcggtgaagcacgcgcttccaagcaactggaagaacagcgcagcgacaaagcgaagctgagcctcgatgatctgtttgaacaaattaaacaaggcgatgtcaaagacatcaatttaatcgtaaaagctgacgttcaaggttcagccgaagcgttaacagccgctcttcaaaaaattgaagtagaaggcgtaaaagtgaaaatcattcacacaggcgtcggtgcgattacggaatcagacatcattctcgcatctgcttcaaatgcaatcgttatcgggtttaatgtgcgcccagacggaaatgctaagagcacggctgaagctgaaaatgtagatatccgtcttcaccgtatcatttacaaagtcatcgaagaaattgaagcggcgatgaaaggaatgcttgatcctgaatacgaagaaaaagtcatcggtcaggttgaagtgcgccaaacattcaaagtgtcgaaaatcggcacgattgccggcggatatgtaacagacggccacattacacgtgacagcggactccgcctgatccgtgacggcgtggtcatcttcgaaggggaagtagacgttctgaaacgcttcaaagatgatgtgaaagaagtttcacaaggatatgaatgtggtattacaattaagaaatacaatgacattcgcgaaggcgacatcattgaagcgtatgtcatgcaggaaatcgaaagaaagtgatcggatttgcggaatgtgaatgcatcatttatgatgcgggatcattaaaggagaaacgagccgttctgaagcggattataacgagggttcagaataagttcaacgtgtcggctgcagaaatcggctatcaggacacttggcagcggaccagcttcggaatcgccgtcgtctcctcctctcacgttcaggcggaaaaggagatccagcgtgtactcgcgtttattgactcctttcccgaaatagaacggacgatcactagaacagagtggttttaacttagaggtgattgaattgagtatgagagcaaaccgtgtcggcgagcagatgaaaaaagagctcggggatattatcagccgaaagctgaaagacccgagaatcggatttctcactgtaacagacgtacgtgtttcaggtgatttacaaatagcgaaggtgtatatctccgttctcggcggagagaaaaagaaagaggaggcgctgaaagggcttgagaaagcgaaaggatttatccgttccgaaatcggcagccgaatcagactccgtaaaacgcctgagcttgaatttgaatttgatgaatcaattgagtacggcaaccgtattgaaacattgattcacgaactgcattcagataaaccgtctgaataacaaggaaagaggatgggcgagtgtcgtctgtcctcttttctgcgttttacgggatacaattgataacaaaggagcgaaagacagatggttaacggagttctccttttacataaaccggtcggcatgacttctcacgactgtgtaatgaaaataagaaaactgttaaaaacaaagaaagtcggacatacgggaacgcttgatccggaagtgtcaggcgtactgccgatctgtgtcggacgggccacaaagattgttgagtacgtcaccgacaagtcaaaaacgtacgatgctgagatcactctcggcttctccacatcgaccgaagaccagactggagaaacggtcagcgtaaaacctgtcaaggagccgctgaaagaagcggatatcaaagccgttttagacgaactgaagggaccgcaggagcaagtgccgccgatgtattccgctgtaaaggtcaacgggaaaaagctctatgaatacgccagggcgggtattgaagtggagcggccgaagcggaatatcacgattgaagatatcgcgctcacttcccctgtcacttataaagaagacacagcatcattccgctttacagtcacgtgctcaaagggcacttacgtcagaacattggcggtgacaatcggtgaaaaactcggctatcccgcgcatatgtcgcatctcatccgcaccgcttccggcgatttcagccttgatgagtgtttcacgtttgaggaacttgaacagcaggtttcagacggcatggttgcagagcatgccgtgccgattgaaagagcgctcaatcatttgccgaaatgggtcataagtgatacattagctaagaaagctgaaaacgggtcagtgtttgacatcccggcggaattttctgcaatgacagctgacgcccgtatagcggtctgtactgaagacggagaatgtgtggccatttatatgccgcatccttcaaaaaaaggactgctgaaaccggctaaagtgctcatgcaaaaaagcgaacaataagaaaaaaggtgaccgttctgtgaagacgatacatatttctcatccgcatcatttacaaaaagaagagcagccggcgtctgtcatggcgctcggctactttgacggcgttcatttgggacaccggaaagtaatcggaacagccagacaaattgccgaagaaaaaggcctgtcgctggccgttatgacgtttcatccccacccttcccatgtgttgggcagggacaaagagccaaaggatctgattacgccgcttgaagataaaatcagccagatcggacgtttaggcgctgatgtgctgtatgtcgtaaagtttgatgaagcgtttgcgtctctgtctccaaaacagtttgccgaggagtatattttagggttaaacgcgcggcacgctgtgggaggcttcgattttacgtacggaaaatacggaaaaggcacgatggagacgctgccggacgatttaaacggcaaggccgggtgcacgactgtcgagaaacagaccgagcaggacagaaagatcagctctacttatatccggtcagcgctgcaggatggtgacgttgaacttgcgcacactcttctcggccagccgtattttatccggggcactgtgattcacggagacaaaagaggccgaaccatcggttttcctaccgcgaatgtcggtctgcacaacagttatatcgtgccgccgacaggcgtgtatgcagtgaaagccgaaataaaaggcgaggtgtatgaaggcgtctgcaacatcggctacaaaccgaccttttatgaaaagcgtcccgatcagccgtcaattgaagtccatttgtttaattttcaacaggatgtatacggagaagacgttaaaatcgagtggtacaaacgaatccgaagcgaacggaagtttaacggcatcgatgaactgacggctcagatcgggaaagacaaacaagaagcgatccgttttttcagcaaataacggaaaaaacatcaaaagtacacaaattttcttctaaaagatttgcatatgggcgcgatttttagtatcatatgtttcgtagtcttaaaaccattgcttggcaatccgaagtcaccgacggttgctaggtaactggggctaattatgatatggaggtgaaacaggatggcaattactcaagagcgtaaaaatcaactcatcagtgagttcaaaacacacgaatctgatactggatctccagaagttcagatcgctatcctaacagactcaattaacaacttgaacgagcatttgcgtactcacaagaaagatcaccactcacgtcgcggtcttcttaaaatggtaggtaaacgtcgtaatcttcttacgtatctgcgtaataaagacgtaactcgttaccgtgagttaattaacaaactaggcttacgtcgataatcgtaaaaagcgggaggattcccgcttttttatcgtattaaagcgaaaaaaataatgataaaaaaacaatgaaatccttttacatactactttgacattgatatgttcaattcatttcgttcataataggagtaattgattatttcacacattaagagaggagctcgtaatcgaatgggacaagagaaacatgtctttaccatagattgggccggcagacagcttacagtagaagccggccagcttgccaaacaggcaaacggcgctgtcatggttcgctacggcgatactgcagtgctcagcacagcaaccgcatcaaaagaaccgaaaccgctagattttttcccgcttaccgttaactatgaagaaagattatacgcagtaggtaaaattccgggcggttttattaaaagagaaggccgtccaagtgaaaaggccgttttagccagccgtctgatcgaccgtccgatccgcccgcttttcgcagacggattccgtaacgaagtacaggtcatcagcattgtcatgagtgttgatcaggactgctcatctgaaatggctgcaatgtttggttcatcactcgctctttgcgtttccgatatcccgtttgaaggcccgatcgcgggtgtgacggtaggccgcattgacggtaaattcgtcatcaatccgacggttgaccagcttgaaaaaagtgatatcaacctcatcgttgcaggcacaaaagacgccatcaacatggtggaagccggagcggatgaagttcctgaagaaatcatgcttgaggcgattatgttcggtcacgaagaaattaagcgcctgatcgcattccaagaagaaatcgtcgcagcagtcggcaaagagaaaacagagatcgaactgtatgaaattgacgaagagctcagcgaaaaagtaaaaagccttgcggagccggatcttctcagcgccattcaggttcacgaaaaacatgctcgcgaagccgcgatcaatgaagtgaaaaatgcagttgtcgcgaaattcgaagaagaagagcatgatgaagatacgattaaaaaagtgaaacagacactgtctaaactcgtgaaaaacgaagtgcgccgtttgatcacagaagaaaaagtccgtccggacggccgcggcgttgatcagatccgcccgctttcttcagaagtcggccttctgccgagaacacacggctccgggctgtttacgagaggacagacgcaggcgctcagcgtatgtacattaggcgcccttggggacgttcagattcttgacggtttaggcgtggaagaatcaaaacgctttatgcaccattataacttcccgcagttcagcgtaggggagacaggcccgatgcgcggaccgggacgccgtgagatcggtcacggtgctcttggagagcgtgcgcttgagccggtcattccgaatgaaaaagacttcccgtatacggtccgcctcgtatccgaagtgcttgaatcaaacggttccacttcacaggccagcatttgcgcgagcacgcttgccatgatggacgcaggtgttccgattaaagcccctgttgcgggtattgcgatgggacttgtgaaatcaggcgagtactatacggtattaacggatattcaagggatggaagacgccctcggtgacatggactttaaagtagccggcacggaaaaaggcgtgacagcgctgcaaatggacattaaaattgaaggcctttcaagagaaattcttgaagaagcgcttcagcaggcgaaaaaaggaagaatggaaatcttgaacagcatgctcagcacgcttggtgaatcaagaaaagaactttctcaatatgcgccgaaaattttaacgatgaacattaatccggataaaatccgtgacgttatcggaccgagcggtaaacaaatcaacaaaatcattgaagataccggtgttaaaattgacattgaacaagacggcaccatctttatttcttctactgatgaaagcagcaaccataaagcgaaaaaaatcatcgaagatcttgtcagagaagtcgaagtcggccagctttacctcggtaaagtcaaacggattgagaaattcggcgctttcgttgaaatcttcagcggaaaagacggtctcgttcacatctctgaactagcgctcgaacgggtcggcaaggttgaggatgttgtgaaaatcggtgacgaaatccttgtgaaggtaactgaaattgacaaacagggacgagtgaatctgtcgcgtaaagcagtgctgcgcgaagagaaagaaaaagaacaggaacaacaacaatcttaaatgaaaacctaacaaggagcctgggagacccggcttctttattttgagaaagacaacagacgggttctaccttgtcctcctcatacataatgtgtgatgaggggggaaggacatgttgaaaaaattcgtgccgtttgccgtttttttatttcttttttttgtttcgtttgaaatgttaaaaaacccgtatacagttgattacatagacgcaatgaaaaaagacgctgtaactgtgtcagcatcaaaagatccgctctatgaagaattactgcaaaaagcgccagagtatgaagtgaagccgcaagacgcgcggattgataaaatatggaagagtataccgggatataacggtttaaaagtcaatgtggaaaaatcctataagcaaatgaaaaaggacggagaatttcacgaagacggccttgtctatgagcaggtaaaaccgaaagtccatcttgaatctctcgcgcccgaacccatttataaaggaaatcccgacaaaccgatggtcgctttcctgataaatgtcgcctggggaaatgaatatgtggagcaaatgctgcctattctgaagcagcaccaggtcaaagcaactttctttcttgaagggaaatggctgaaaaacaatcaggaactggggaaaaaaatagcggcagacggacatgaaatcggaaatcattcatacaatcaccctgatatgagcaaactgacttcaggaagcatttccgaacagcttgacaaaaccaatgcacaaatcagcgagacgctcggcataaagccgaaatggtttgcgccgccaagcggcagcttcagaaaagctgtggtcgaccttgcggcggaaaaaggaatgggcaccatcatgtggacggtggacaccattgactggcaaaaaccgtctccggctgttttacaaacaagggtattgagcaaaatacataacggagccatgattttaatgcatccgactgatccgactgcgaaaagcctggatacactgattgcaaaaatcaaagaaaaaggctacgcgctcggctcggtgtctgacttaatggatgaaaacaggctgatgaagtagcaggcggcagttgcctgtcttgaataggaggaacagacttgataaaacgctatacatgccaaaacggtgtaagagttgtgcttgagaataatccaacggtgcggtctgtggcaatcggcgtctggatcgggacgggatcacgtcatgaaacgccggagacaaacggtatttcgcactttcttgagcatatgttttttaaaggaacaaataccaggtccgcacgggaaatcgcagagtccttcgatcggataggcggccaagtgaatgccttcacttcaaaagaatatacgtgctattacgccaaagtgctggatgagcatgcaaactacgcacttgatgtgctggctgatatgttctttcattctgcttttgacgaagatgagctcaaaaaagaaaagaacgtcgtatatgaagaaatcaaaatgtatgaagacgcgccggatgacattgtccacgatctgctgagcaaagcgacatacggcaatcattcgctcggctacccgattctcgggacggaggaaacgctttcgtcatttaacggcgattctctcagacagcatatggatgacttttacacgccggaccgcgtcgtcatttctgtcgccggaaatgtaacggaacaattcattaaaaacgtggagaaatggttcggtacatacgaagcgaagggcaaagcaagcggcatcagcgagcctgagtttcattatgaaaagctgaccagaaaaaaagacaccgaacaggcgcatctctgtctcggtttcaaaggcctgaaagtcggagatccggacatttacgatttgatcgtcttaaacaacgtgctgggcggaagcatgagcagccgtcttttccaggatgtgcgcgaagataaaggactggcctattctgtatacagctatcacagttcctatgaagacagcggtatgctgacgatttacggaggcaccggcgcgaatcagctcggacttctgtctgaaaccattcaggaaacgttatcggttctaaaacgtgacggtatcaccccgaaagagctggaaaacagcaaagagcaaatgaaggggagcttaatgctcagcttagagagcacaaacagcaaaatgagccggaacgggaaaaacgaactcctgctcggaaagcataagaccatggatgaaattatcactgaattaaatgcggtcagcctggaaagcgtcaacggcctcagccgccgcttatttacggatgattacgcactatcgctcatcagcccgaccggcaatatgccggcctcgtcttaatcggcaaagcagtctgcctctttacggggcaggcatttttttttgctccgggtcatatagtacaagggggtggctatcatgaggctcagtgaactgtcaggtaaagaaattgtggacattaaacgggcagagcggctcggcgtgctcggccagaccgatttggaaattaatgaacaggacggacaaattaccgcgctgttgattccgacggtaaaatggttcggattgcgaaaacaaggccacgacatccgcgtcccctggaaccatatccaaaaaatcgggtcagacatgatcattttagacgttccgggggagatcacgcctcccgaagagtagatcttattcatttttttgcaagcaccggctcatacagccggtgctttttttatgaaaaagacgctgtacattcaccgccctttctctttgcacatacgatgaagaggaggatgacacttaaaagatccagtaactgtaaagaaggtgaacgtttcagatgttaaccggattgacaattgcgattattggcggtgacgcaagacagcttgagattataagaaagctgacagaacagcatgccgatatttttcttgcaggatttgaccaattggatgacggttttacaggtaccgtcaaatgcaaaattgatgagattccctttcaaaaaatagacagtatcatcctgcccgtatcggcaacgaccggagaaggcattgtttccacggttttttcaaatgaagaagtggtattaaagcagagctatcttgagcagacaccggagcattgcgtcatttattcaggcatctccaacgcgtatcttgaggggatcgccagcgaagccggccgcaagcttgtgaaattatttgaacgggacgacatcgcgatattcaactcgattcccactgttgaaggaacaatcatgatggcgattcagcatacggattataccattcacggatcaaatgtcgctgttctcggcatggggcgcaccggtatgacgatcgcccggacgtttgcggcgttaggggcgaaggtaaaagtgggcgcgcggagttcggctcatttggcccgtataatggaaatggggctttctccttttcagcttgaagagcttactgaacatgtaaatgatattgatatctgcattaacaccgtaccgagcttgattctgaatcaaagcgttttatcgcgcatgacgccgaagaccttgattttggatttagcatcccgtccgggcggaacggatttcaaatatgctgaaaaacaaggcattaaagcgctgcttgctccgggtcttccgggaattgtggccccgaaaacagccggacagattattgcgaacgtattgagcaagcttttggcagacttaaagaaagaggggaaataaccatgtctctgaaagggaaaagaatcggattcggattaaccggctcgcattgcacatatgaggaagtttttccgcaaatagaggcgcttatcagtgaaggagctgaagtccggccggtcgtgacgtcaaccgttcaatcgaccgatacccgctttggggaggggggagattgggtcagaaaaattgaagaagcaacaggctttgaggcgattgattccatcgtaaaagcggagcctctcgggccgaaacttccgctcgactgcatggtcatcgcccccttaaccggaaattcaatgagcaaactcgcaaatgcgatgactgacagccccgtccttatggctgcgaaagccacgatccgcaacggccgcccggtcgtgctcggaatttcgacaaacgacggactcggtttaaacggaacgaatttaatgaggctgatgtccgcaaaaaacatatatttcatcccgttcggccaggacgaccacgtgaaaaaaccgacatcgctcgtcgccagaatggatctccttccgattacggtagaaaaagctcttttgcaccagcaggttcagccggtgctcgtacaccatcatgaataaaatatcatgatgacagaaaatcattccggaataaaaaaattcggtcaatccgtgactattctatggtaaaataaaacgtaaaatgcaaagtcaattcaacaaatgatgcttaattggcggaaggagttttacagatgggaagaggattacacgtagcagttgtcggagcgacgggagccgtaggacagcaaatgctgaaaacactggaagacagaaactttgaaatcgaaacactcacactactatcctcaaagcgttctgctggtacgaaagtaacgtttaaaggcgaagaatatacagtgcaggaagctgttccggaaagcttcgaaggcgttcatatcgcgttattcagcgccggcggaagcgtatcacaaagcttggcgcctgaggctgtaaaacggggagccatcgtgattgacaataccagcgcattccggatggacgaaaatacaccgctcgtcgtgcctgaggtgaacgaaggtgatctgcacaaacataacggcattatcgccaaccctaactgttcaacgattcagatggtggctgcgcttgaaccgatccgcaaagcgtacggtttgaaaaaagtcattgtatctacttaccaagctgtgtccggggccggcaatgaagcggcgaaggaattgtacagccagacaaaggcgattttaaacaatgaacccgcagaaccgtccattatgccggttaaaggcgacaaaaagcattatcaaatcgcatttaacgccattccgcaaattgataaattccaagacaacggctatacgtttgaggaaatgaaaatgattaatgaaacgaaaaaaatcatgcatatgccgaatctggaagtggctgcgacatgtgtcagactgccgattgaaacaggacattcagaatctgtttacattgagcttgaccgtgatgacgcaaccgttgaagatatgaaacagcttttaaaagaagctccgggtattacgcttcaggatgatccggcggagcagctctacccgatgcctgctgattgcgtcggcaaacgcgatgtatttgtaggaagaatccgtaaagatttggacagagcaaacggttttcatttgtgggttgtttctgataacctgttaaaaggcgccgcttggaactcagtccaaatcgcggaaagcctgcaaaaactgaacctcgtataaaacaaacgtattttctataggcgaacagaagagagtaaggctctgcctgctctcttctgttacgtcagactaatttggagtgaaaatagtgaagatcattgttcaaaaattcggcggaacatccgtaaaagatgacaaaggccgcaagcttgcgctagcacacattaaagatgccatcagtgaaggttataaagttgtcgttgtcgtatcggcgatgggaagaaaaggagacccgtacgcgacagattctttaatcgggctcctttacggcagccagtccgacatttctccgagagagcaggatatgcttctgtcttgcggagaaacgatttcgtccgttgttttttccagcatgctgaaggaaaacggcataaaagccgcagctttaacaggagcccaggccggctttttaaccaatgcccagcatactgacgccaaaattatagaaatgaaaacagagcggcttttcgctgcactcgccagccatgacgctgtcgttgtcgcgggatttcagggagcgactgaaaaaggcgacacgacgacgatcggcagaggaggaagcgatacttcagcagcggcgctcggagcggcggttgatgctgagtttatcgacatttttacggacgtggaaggcgttatgacagccgatccgagaatcgtggaaaatgctaagccgcttccgaacgtcacatatacggaaatctgcaaccttgcctatcaaggcgcgaaagtcattcatccgcgcgcggtggaaattgccatgcaggcaaaggtgcccattcgcgtgcgctccacttattcaaaagacaaaggcactttggtgacgtcccatcattcgtctaacatcggcagcgatgtattcgaacggctgattacagggatcgcccatgtgaaagatgtgacgcaatttaaggttcccgccaaaatggggcaatacaacgttcagactgaagtctttaaagcaatggcaaatgccggaatcagcgtagatttctttaacattacgccgagtgaaatcgtatataccgtagccggcagtaaaacggaagccgcgcgcagcattttggctgaattaggatatgagccgacagtgacggagagctgtgcgaaagtgtcagcggtcggcgccgggataatgggtgttccgggtgtcacgtcaaaaatcgtctccgcactttctgataaaggcattccgattctgcaatctgcggacagccatacgacgatctgggtgctcgttcatgaaaaagatatggtaacggccgtaaatgcgctgcatgaagtgtttgaactttcaaagtaaatgtgattgaatcatgatgaggtgaaaaaaatgaatgtcggaaatatatctacagcgatgattaccccctttgacagtaaagggaatgtagactttcaaaaactgtctacattaatcgactatttgttgaaaaacggcacggattctttagtcgtcgcaggtacgaccggcgaatctccgacactttcaacggaagaaaaaattgcactctttgaatttacagtcaaagaagtgaacggacgcgtgcctgttattgcgggtacgggaagcaacaatacgaaagactccattaaactgacaaaaaaagctgaagaagccggcgtcgattgcgttatgcttgtcacgccgtattataataagccttcccaagaggggatgtaccgtcattttaaagccattgcggaagaaacgtctcttcctgtgatgctttacaacgtgccgggcagaacggtcgcttcgcttgcgccggaaacggccatcagacttgcggagattccgaatatctctgcgattaaagaagcgagcggcgatcttgatgccattacgaaaatcattgccgaaacaccggaagatttttacgtctattcaggtgatgacgggttaacgcttcctattctcgcagtcggcggaagaggagtcgtgtcagtggccagccatatcgtaggttctgacatgcagcagatgattaaaaactatacaaacgggcagacggcaaccgcggcactgattcatcagaagcttctgccgatcatgaaggagctctttaaagcgcctaatccggctccggtcaaaacggcgctacagctgaaaggccttgatgtcggatctgtgcgtcttcctcttatcccgctgaatgaagatgaacgtctgagcctgagcagcgtcatcagcgaactgtaagaaaaaatttatacagttaaaatacgcggtcattctcatttttatcgtgagtttgaccgttttgtatacatattggttttccctaaaccttccgcttcttcttgttttctaaaattgatatcagttataataggaacaagtgatgatggacgggtatgagactaggaggatacagattttgaaaaagaaaaatacagaaaacgtcagaattatcgcccttggcggcgttggagaaattgggaagaacctatatgtcattgaaattgactcagacatatttgtagtggatgcagggctgatgcaccctgaaaatgaaatgctcggtattgatgtcgtcattccggatatttcctacttagtagaacgggctgaccgcgtgaaggccatctttctgacacacgggcacgatgaaaacatcgggggcgtcttttatttattgaacaagctgtcggtgccggtatacggaacgaagcttacgcttgcattactgagagaaaaactcaagcagtacgggcataatcgaaaagctgatttgcgtgaagttcattctaaatcagtcattacatttgaaacaacgaaagtatcgttctttaaaacgattcacagtattccggattcagtgggagtcagcttcaaaacatcacttggctctattgtatgcacgggagacttcaaatttgaccagacgcctgcttatcaccaatcatgtgatattggcgaaattgccaaaatcggaaacagcggcgtgctcgccctgctttctgacagcgccaatgcggagcgcccgggatatactccgtcagaagcatatgtaagcggtgaaattgccgatgcgatgaacaattcagaaaaccgtgtcatcattgctgtattcgcgtctaatatcaaccggatccagcaagtgatacaggctgccgtccagaacggccgcaaacttgcaatcgccggaaaaaatctgcaaaacgtgcttcagctggggcgcaagctcggctatattgaagccgaagatgaaatgtttattcctgtacaggatgtgaaaaaatatccgaagcgggaagtggcaattgttacagccggaagccatggtgagccgctggccgctcttacgcggatggctaagcaggcgcacaagcagcttaacattgaagaaggagacaccgttgtcattgcatcaacaccgattccggggcatgaattgatatattccaaaaccgtcaacctgcttgcccgcgccggcgctcaagtcattttcgcccaaaaacgcgtgcatgtgtccggtcacggttcgcaggaagaattgaaactcatgcttaatttgctgaaaccgaaatatttaattccggttaacggtgaattcagaatgcaaaaagcgcattccaaaatcgcagaagagatcggcatgaaacgcagcgacattttcttgattgaaaaaggtgacgtcgttgaattccgcggacagaatgtaaaaatcggggataaagtcacgtacggaaacgttctgattgacggcctcggtgtcggcgacatcggcaacatcgtgctgagagaccgccgcttattgtcacaagacggcattctcatcgtcgtgatttcactcgataagcagaaaaagaacctcgtatcaggtcctgagatcattacgcgcggtttcgtgtatgtcagagaatcagaaggtttaattgtacaagctactgagctcgtccgctctatcgtgactgaagcgacagaaacatctgccgtagaatggtccacgctgaaacaggcaatgcgtgatgcgctgaatcaattcctttatgaaaaaacaaaacgcaagccgatgatcattccgatcattatggaagtataatgtatacacagccggagcgcatgatgctccggctgtgtttttgttcatgtcccggatggaaatcatcatctttgttcataatacaaagagacattcggaaagggtgaaagataaaatggatcatcgtatggaaaacaccgaagaacagcagcccgaaaaatcagatgcgaaagacagcattatgagcaaaattcagcagctgggagagacatctctgccgcaaatgtcccaagataccaatattcactgcctgacgatcatcggccaaattgaggggcatgtccagctcccgccgcaaaataaaacaaccaaatatgaacacgtcattccgcaaatcgtcgcgattgagcaaaatccgaaaatcgaaggacttctgatcatcttaaacaccgtcggaggcgatgtggaagcggggcttgcgattgcggaaatgctcgcatccttatcaaaaccgaccgtttcaatcgtactcggcgggggccactcgataggtgtgccgatcgccgtgtcatgtgatcatagttttatcgcggaaacagcgactatgaccatacaccccgttcggcttacaggtctggttatcggggttccgcaaacatttgaatacctggataaaatgcaggagcgggtcgtcaactttgtgacccatcattcaaatatttctgaagaaaaattcaaagagctgatgttttcaaaaggaaacttaaccagggacatcggaacgaacgtagtcggcaaagatgcggctgattacggattaattgatgccgtgggcggcgtcggacaggcgataaaaaagctgaatcagctgattgaggaacgaaagggcgaggaaggaaggatgattcaatgatcctttataccgtcatgccccaagaagtcatttacggtcaggatatagagcaaagcgtgcatgaacaggtagattacgccggcgtgccgctgttagttgagatgaagggaaatgaagctgaagtcgtacagattttaagtacgaacccgatggattttctgaatccggacatcgctccgggacaaaaaatcaagctgaaaatctaaccggcattcagtccgtttctcgggggcaaaatatgctataataggggaatcctacagaaaaatgcagccggcaaaaggctgcttttcttcatgatgtatgattttacattttttaacgcagtaaggtgatgagtgtggcaaagaaaaaacggaaatctaaaaagaaacaagagagtaagctcaatctaaaatacgaactaagcggactgctctgtgttgcaatctcaattattgctgttttgcagctcggcgttgtgggacagacatttgtgtacttgttccgtttttttgccggagagtggtttattttatgcttaattgcgctcttccttctcggaatttcgctgttttggaaaaagaagagtccaagccttttaacgagaagaaaggcagggttgtactgtattatcgcaagtatattgctgctgtctcacgtgcagctctttaaaaatctgtctcatcacgggtcgattcggtcggcaagtgtcatcggcaacacgtgggagctgtttatgattgacatgaaacagcaggctgcttcccctgatttgggcggcggcatgatcggcgcggtactgtttgcagcttcccactttttatttgcatcaacgggttcacaaatcatggcgatcgtgctgatcttaatggggctgattcttgtaacagggcgttcactgcaggaaacgctcaaaaagtggacgagccccgtcggccggtttatccgcggccagtggcaggcatttcttgaggatatgaagacggtcagaacgaatatgtcttcgccgaaaacaaaaacaaaatcgggcaaaaaacaaaaacgggttcaaaagaaaaaagaagagcctgaaccggaggaagaggatgaggaaattatttcgccgatcatccattcagagccgattatttcaagcttttcagaccgtcaggaagagcccgccgaaccgctgattccggaaaaaacgcaggagacggcacaagcggcaaaatatgagccttccggcggcgctcaagacagtggcgaaacggctgcggctccgccgatgacgtttacagagcttgaaaataaagattatcaaatgccttcattggacatactggctgacccgaaacataccggccagcagaccgataagaaaaacatttacgagaatgcaagaaaactcgaaaggacttttcaaagcttcggcgtaaaggcgaaagtgacccaggttcatctcggtccggcggtcacaaaatatgaagtgtatccggacgtcggggtcaaagtcagtaaaatcgtgaatctgagcgatgacctcgcgctcgcgcttgccgcgaaggatatccggatagaagcgccgattccgggtaaatcagcaatcggcatcgaggtgcccaatgctgaagttgcgatggtttcgttaaaagaagtgcttgaatccaagctcaatgacaagccggacgcgaagcttctgatcggcttgggacgaaatatttccggggaagccgtgcttgccgaactgaacaaaatgccccacctgcttgtagccggggcaacgggaagcggaaaaagcgtctgtgtcaacggtattattacgagcattctgatgagggccaaaccgcatgaagtgaagatgatgatgattgacccgaaaatggttgagctgaatgtgtataacggcattcctcatctgcttgcgccggtcgtgacagatccgaaaaaggcctcgcaggctttgaaaaaggtcgtcaatgagatggagcgccgctatgagctgttctcccatacgggtacgagaaatatagaaggctataacgaccatatcaagcggtcaaatgccgaagaagaagtcaagcagcctgagctcccgtacatcgtcgtcatcgttgacgagcttgctgatctgatgatggtcgcttcttccgacgtggaagattcaattacgagactttcacagatggcgcgggcggcgggaattcatttgattatcgcgacacagaggccttcagttgacgttattaccggtgttattaaagccaacattccatcaagaattgccttcagtgtctcatctcagaccgattcacggacaattttagacatgggcggcgctgaaaagcttctggggcgcggagacatgctgtttctgcctgtaggcgcaaataagccggtgcgtgtgcaaggggcattcttatccgatgaagaggttgagcatgtcgtcgatcatgtcattacgcagcaaaaagcgcagtatcaagaagagatgattccggaagaagtttcggaaacacacagtgaagtaacggatgatctctatgacgaagcggtcgatttgattatcggcatgcagacggcatcagtctccatgcttcaaaggcggttcagaatcggatatacgagagctgcccgtctgattgacgcaatggaggaacggggcgtcgtcgggccgtatgaaggaagcaaaccgagggaagtactattatctaaggaacaatatgatgagctctcttcttaaaaaggagagagttttcactgaaaatgatatcaccaaaatcattcctatttatttttttattaaaacatgatatagttgtcccaattgttcaataatttatgaaagtggtttacggaggggaaacatgtctacaaaagctgacaatcgtcacttgtatctaaaagtgattgagcgaatcaaagaggatatacaaaacggaatttacaccgaaaaggaaaagcttccttctgaatttgagctttcaaaatcaatgggtgtcagccgggcaactctgcgtgaagctttgcgtatccttgaagaggagcatgtgattatcagaaggcacggtgtgggcactttcgtccatacaaaaccgctgtttctttcaggtattgaacagctcaacagcgtgacgaaaacgattcagcaggcgaacatggtgccgggtacgatttttttgtcgtctcaggtcatcacgccgtctgatgaagatatcgctagattccggcttgagcctgagcaggagcttttttatttggaacgcgtgagaacggcaagcggcactccggtcgtttattgtttagatacgattccgatgcacattctgccgaattctttctgtcatgaacaggagtctattttcgatcttttggaaaaaaactccgggtctgtgatcagctatgccgttgctgatatcgaaccgatcggatatcacgatacgatttcaccggttttggaatgtgagccggagacggcgcttttattgctgaagcaaacccactataatcagaatgatgaacctgtgctgtattcattaaattatttccgggctgataagttcagttttcatgttgtaagaaaacgtttttaagacagacgcgtcatgtgtctgtttttttatttgccgtttcagtacatactttgttttctgcaaggcacaataaaacaggaaacaaccaagtatagtgaatgggtgaataagttgagtaagaagaaaaatggaacgaaaaatatcattgctctggcttctgtaccgctcgtgatgacactcgggaattccatgctgattcctgtgcttccgatgattgaaaagaagctgtccatatcgtcttttcaagtatcgttaattataacggtctattcgattgtggcgattatttgtattccgattgccggatatttgtccgataaattcggaagaaaaaaggttcttctgccttgtcttctcatagccggtgcgggcggagcgcttgccgcgatagcttccaccgcgttcaagcatccttatcccattatcttggcgggacgggtgctgcagggaatcggttcggcaggggcggctcctgtagtgatgccgtttatcggtgatttattcaaaggggatgatgagcggattaccgcggggctcggcgacattgagacgtctaacactgccgggaaagtaataagcccgattctcgggtcgctcttggctgcatggttttggtttatgccgttttggttcattccgtttttttcgctcatcagtttttttctcgtattgtttttggtggcaaagccggaggaacaaaaagaagcgccttctatttccgaatttgtgaaaaatgtcggccgcatatttaagcgtgacggacgctggctctttacggtttttatcatcggctgcgtgattatgtttttgctgttcggggttcttttttatttatcagactcactggagaagaaatacggaattgacggtgtggctaaaggagcgcttttggcaatcccgcttttatttctatccgtcagttcatatatatcaggcagaaaaatcggaaaagaccaaggcaaaatgaagttttgcatcgttttcggaatgagtgccgtgacactgtcgtttatcggcctatggtggaatcacagtttttatttattatttatctttttgtgtgtcagcggtatcggtatcggaatggcattgccggctttagacgctgtcatcacagaaggcgtagacaacgaggaatcgggaaccatcacctcattttataacagcatgcggtttatcggagtagcggcgggaccgccgatctttgctgccctgatgtcaaatgcaggctggctgatttttattttatccgctttttgcggcattgtgtctgtatttttagcgctgttaaatatctcatcacaagcaaaagaaaaaaaggaatcattaaagacggtgtaatctgcactgtctttttttattttattttgaagattgacatgataccgtcaagtcgttattctttttaatagttaaacatattaactatcggaaggagggggaaaaggtgcatgaagaaaaagtaaagcagctgattcagcgttattccgatgtatacctgcacgtcttaaaaaaaattgacagcattatcgctgaaaaagtgaacaaagagctgacattggatcaatattacatcctccgctatattatgctcaatccggattgcaaatcaattgaactggccgcggtgtgccacgtcaataaaagcgccattacatcgatgacgaaccgcctgtatgaaaaaggctacatcaatagagaacgcagccaaagcgaccgccggagcatacttttaaatgtcacggaaaaggggacggaagtatttcaccgtgtggagcggcggattgaggaactcgtccgttcatatattatgtattttgatgaagacgaggcggagatgttcgttaatacatatgaaaaattatatcgattgatgatgacagaggaggatcagcagacataatgaaaaacattatccgagcccgctggatcatcgccgcggtatgggtcgccgcaacggtgatatttatgcttacagcgcctggtatggctgaattgacacgggagaaagggcagatttccgtaccggacgggtattcctcttcttacgcccatgaattgcttgatgaaatgtctgattcagatgcaccgtcttcttctgccgtcatcgtatttcacgaaaaaggcttaatgacagacaaaaaagatcgtctggaagaagccgtcagcactttgtctgaacagaaaaaagcgcttcagattaaaacggtgacttcatacttcggggagaaaaatgacgacatcaaaaaacagctgctgtcaaaagacagacaaacgatgctcgttcagctgcagcttgatacatccaaaaacgatatcctcgaaataaaaaataaaattgataaagagctgaaaccgtacggcgtatcatacggcattacaggccagtcgctgatcgacgaagatgtgttaaaaagctcgcaggacggcttaaaaaagactgaatatataacggttgcctttatcctgatcgtgctgattcttgtatttcggtcagtggtcgctccgtttgtaccgcttttatcagtattgatatcttatttagtcagccagtcgattgtcgcatttttagtcgatcaactgaattttccgctctcaacttttactcagatttttatggttgcgattatgtttggaatcggtacagactactgcattctgcttctcagccggtttaaagaagaactgtcgcatggcgctgatataagagaagcgatcgtcgtcacctacaaaacggccggaaagacggttttgtacagcggcggtgcagtgctgatcggatttgcctgcatcggatttgcgacatttaagctgtatcagtcggcagccgccgttgcggtcggtgtcgcggtgctgctgcttgcgctcatgacgatcgtgccgttttttatggctgttttaggaaaaagactgttttggcctgtgaagggcgatatttcccatcctcaaagcaaagcatgggaaacgtcagggcggttttcatttaaaaggccgctcatcagtcttgcaatcgttgcggcattcactgtcccgcctatccttctttacaaaggggcgctatcttacaacagtcttgacgaaatcggggataaatatgaatccgtccgcgcgtttaatacgatttcagacgccttcggcccgggagaacttcttccggccacagtcgtcatcaaaaatgatgcgactttaaataccgaaaaacacctgattgatatcgaaaaaatcagcagagaacttgaaaaaacagagggtgtaaaaacggtcagaagcgccacgcgccctgctggaaacggattgaatcaattatttgtcacaaatcaggcaaagcagcttcaagaaggacttgataagggcaatacgggacttgaaaaaatcacggacggattagggcatgccgcacagtcgttagctgattcacagccgcagatcgaagagtcggggaaaagcgtcaatcagcttattgacggaacattgtctctgaaatccgggctttctgatataggagaaaacctgaataaactgcaggctggcgtgaacgagaataaagccggcgtcgcccagatgagaaagcagattgaagagcaaaaacaaatgctgacttcacagctcaaacaaaacagcggtctcgcttcagaaacgcaaaacgctttaaaattggtaaaaaccgtcctgccgatgaaagatgaagccagcagacagcttgccgatttgaacaagcagcttgcccggctgccgtttgcaaaattggaagcgtcaataccgtcagtcaaaaccgatccctcttaccaagaaatcaaatcggcctttacgggtgtacagtcagccgtttccaaggcaaacgcggatgcagaagctttttctaaacaggtcgacagtcaaaaggctcatctgcagcaagcggaaaaacaatttgcccggctggcagccgctcagaagaagattgacactcaaattaacgcaatgatcaacggtctgaccagtattgaaaacggtctgcagcaagtgtcagacggacagggggctctcgcaggacaaatgccgcgccttgaatcggcggcaggacagctcgcggagggccagaaaaaaatgaagagcggtctcggtgatttttcttcccggctcagcgatctttcttccggccttaacgacagtgtaaaagggcttaagaaagtatcaagcggcatgatgggggcgaatgattacctgggtgagcttcacaaggcgtcagacaaagaaatgacaggctggtttgtgccgaaagacgcgttgacaaacagtgatttcacaagcgtgtttaatacgtacatgtcagatgacagaaaaacgacagaattgaccgtcgttcttgataataatccttactcaaatacggccgttcaagatattcaagcgatcaaagcgagcgtaaaaagggccattccgaacacggatctgaagaatgcttccttcggcgtttcgggagtctccagcatgaatgccgatctgaaggaagtatcggattcagacttcaaacggacggcaatgtttatgctggcgggaatttttctgattctcatcgtgatgctgcgctccctcattatgcctgtttatttagtggcgtcgctcgtactgacgtatttcgcatccatcggcgtgacggaatacatctttacacacttcttcgggtatccgggcgtaaactgggccgtgccgttcttcggctttgtcattttgatggctctaggcgtggattattccatctttttaatggaccgttttaatgagcttaaaaaagaaggaacggaacccgcaatgatcagcagtatgaaaaatatgggttccgtcatcatttctgcggcgattattttagcgggaacctttgcggccatgctgccgtcaggcgttctttccttattacagattgcaaccgtggtattaacaggccttctcatgtacgcaattgtggtccttccgttttttgtaccggtcatggtgaaaatattcggaagagccaactggtggcctttcaatttgaaaaaataacgttcaatatctctgcctgttttcgggcagaggttttttgtttccttataaatcctccagttgatataattacatctgcgtactcttttttgcgaatgctgaaatttggtcataatacatactatgaaagaatgaacgaaggaggtttcacatgacttacgtaaatgaaatgaagtcaaagcacggcgggatcaccgcccacatcgtaaagaccgagaaatttaaaaccgtttcgctgacgtttaaaatgctggctcctttaacgaaagagctcgtaacaaaaagagcgctgtttccgcatgtgcttctgcgcggaacagaaagccgcccgaaaaccgctgatctgcggtcttattttgatgagctgtacggcacatccgtttcagctgatctgacaaaaaagggagaacgtcatgtcattacgttcaggcttgagattcctaatgaaaagtatctgaaggaccgcacaccgttattggaaaaaggccttcagcttttatcagagcttgtcttttcgcccgctttggaaaacggcgccttcctgcccctttatgtcacgcaggaaaaacggacgctgaaacagcggattcaagccgtatatgatgataagatgagatattctaatctgcgtctcgttcaggaaatgtgcaaaagcgaaccgtatgcccttcacgtcaacggcgagttcgatgatgttgaacacattacaccgcaagatttgtatgaagcctatcaaaaagccatacgcgaagatcagctggacctgtacgtcatcggcgatgttgatacagatcaggtgaaaacggccgttgatacgtactttaaaacggaagaacgggagctgcagccttttgaaagaagcgcggcgaatgaacagcccgatccgaaggaagtcattgatgaagaggacgtcaagcagggcaagctgaatatcggatttcggaccaatacgacatatacagatccggattatcctgcattgcaggtgtttaacgggctgttcggaggtttctctcattcaaagctgtttataaatgtccgtgaaaaagcgagcctcgcctattatgcagcctcaagggtggaaagcttcaaagggcttttgatggtcatgtcgggcattgaggtgaaaaattacaagcaggccgtcaccatcattgaagaacagtttcaggctatgcaaaacggtgacttttcagaagatgatatcgcccaaacgaaagccgttattaaaaaccaagtattagaaaccattgatacggcatacggtttagcggaatttctgtatcagcaggcctcagcccaagtagagataccgatcgaaagattccttgacaatatcgagaaagtgacaaaagaggacattatcaatgtcggaaagaacattaagctggatacgacttatttcttaaaagggacggggggagcatcttgactaaaccgataaacttcgaacagcttcaggaaacgctgtatcatgaaaaaatggcaaacggccttgatgtctatgtgctgccgaaacagggctttaataaaacatacgccgtgtttacgacaaagtacggttccattgacaatcaattcgttcctttaaataaggaagaaatggtacacgtccctgacggaatcgcgcattttctggagcataaactgtttgaaaaagcggacggcgacgtgtttcaggacttcagtaagcagggggcgtcggcaaatgcctttacatcatttacacgaaccgcttatctgttctccagcacttctaatgtggagaaaaacctggaaacactcgtggattttgttcaggacccgtatttcacggaaaaatcagttgaaaaagaaaaaggcatcatcggccaggaaatcaatatgtatgatgataatccggattggcggctgtttttcggccttatcgaaaatatgtataaagaccaccccgtgaaaattgacattgccggaacggtggagagcatctcacatattacgaaagatctgctgtatgagtgctacgaaacgttttatcacccgagcaatatgctgctctttatcgtcggtcccgtagatcctgaagcggtcatcagccaggtgcggaaaaaccaggagaaaaagccgtttacagaccagcctgaaatcaaacgtgaagaagttcaggagcaggaagcggtcttccgccgggagcaggagttaaaaatgaacgtgcaaggctcaaaatgtcttgtcggcttaaaggcgaaagacccttataaaacggggcaggagctgttgaagcacgagctcagcatgaacctcatgcttgaatgtcttttcggaaaaagctcaccgcattacggcgacttgtacgacaaaggctacattgatgaaaccttcagctttgattacacggctgaatacggattcggttttgcctctgtcggaggagatacaccggagccggataagctcgctgacgaattaaaacacatgctgcttgatgcggaatcagccgtgactgcggaaaaacttgaccttgcgagaaaaaagaagatcgggtcattcttaaaagcgctcaattcgcctgaatatatcgccaaccaattcacacgctacgcctttttagatatgagtctgtttgatgtcgtaaccgtactggagcagattacgctggaagacgtaaagcgggttattaaagaagaaatatcagaagaaaggctgacagtctgcaaagtcgtgccaaaatcataacaaaaacatccctcacgccctgagggatgtttttctggggaaagaaggagtatggattgatgaaacagacagcgctcgtaaccggagcaagcggcggaatcggacaaagtataagtgaagtcctcgcaaaaaacggatatgacgtccttttgcattatcattctaataaggaagccgcacacaggcttgcggaaaggctgagcgcatcattcggcgtaaaagcctccgttattcaggcggatctgtcctcaccggatggcgcggagacactcagccgttccgttaagcagcctgtggacgctctgatattaaacagcggcaaaagtcacttcggcctgattacggacgttacggatgacacggcgcgggagatggtgcagctgcatgtgacgagtccgtttcttttggcgcgtaatctggtgcccggcatgattcggaaaaaaagcgggggcatcgtcgcgatcggttccgtctggggagaaacgggcgcatcgtgcgaggtattatacagcatggtcaagggagcgcagcattcgttcgttaaagcgcttgccaaagagcttgctccgagcggcgtccgagtgaatgcagtctcgccgggtgccgttgatacaaatatgcttgatcagttcacgtctgatgaaaaagaagcgttggcagaggaaattcccgcgggccggctggcaaagccggaggaaatcgccgaagcggcggcctttttattatcggaaaaggcttcctatattacggggcatatattatccgtaaacggcggctggcactgctgaaaaaaatgtgtgtatagtttgcatctgtacggacaaaataattttgtaacaacagatgaaatggaggaacccaacatgtcagtattagaaaactgggataattggaagaatttccttggcgacagattgaactatgcgcaggaaaaagggatgagtgatgaaacgatcactgacctcgctacagaaatcggcggttaccttgcgaacgaagtcgactcgaaaaaccatcaggaaaaagtgcttgctgatctttggagcgttgcttctgaagatgaacagcgcgccatcgcaaatatgatggtgaagcttgttgaaaataacagcactcattaagaggggggatttctcctctctttttttatgttttcctctatagagcaacattcttctttctaattagagaaaaatgttttatgataaaggaaggtaaaaatttgccacaatggagggggtatatcatttggcaaagctcgaatggtattttgaatatgaaattcaagtgaaccgccccggcctgctcggggatatttcatctcttctcgggatgctgtcaattaatattgtcacaattaacggtgtcgacctttccagaaggggaatgctgctcagatgccggcatatagatcaaattaaacgattggaatcaattttaaaaacaatggagaccattaaagtaacgaagctgagagaaccgaggcttcgcgaccgtctcgcagtccgccacggaagatacattcagcgtgatgccgatgacaaaaaaaccttccgttttgaaagggacgagctcggtcttctggttgactttatggccgagctgtttaaaaaagaaggacacaaactgatcggaatccggggaatgccgagggtcggaaaaacggagtccattgttgcgtcaagcgtttgtgccagcaaaagatggcttttcgtatcatcaacgctgctaaaacaaacgatccggagccagctggttgccgatgaatacagcacggaaaacgtgtttatcctcgacggcatcgtttcgacaagacggggatctgagcgccatcttcagctcgtcagtgaaattatgcggcttccggcgacaaaggtcgtggagcaccccgatatttttgttcaaaattcggagtatacgctcgatgatttcgattatattatcgaactcagaaatgatcctgacgaagtcattacatatgaacatgcagaagaaccgcaaatgtttgatcagaccggtttttcaagctttgatttttaatattggaaggtgtttgttgtgacagaattagcaatccggcttaaagaagccagagaggaaaaagggatgtcgttggatgaactccaggcggcgacgaaaattcagaaaagatacttaaccgctctggaagaaggcaattatgacgtcattcccggcaatttttatgtgcgggcgtttatcaagcaatacgctgaagctgtcgggcttgattcagatcagttatttgaagaatataaaaaagacatccctaacacgtaccatgacgatgtgtcggaaaaaatctccggtcttgccatgcaaagggagcttcctaagtccgcttcaaaggcggcggaatggcttccgaccgtccttgtcgtcatcggtgtcattatcgtcatcgcgatcatttatgcgattattcagctcggaatgagcaaatccgggcagacagacggagataaagccgtcacccaaagtgagagcaagtatgagattcctaaggattctgcgctgaaaaacgacggcaatacaaatgacgaagcgcaatctgacagcaaaaaagacaaaaaggacacaaaagcgtcagagcagaaaaagaaagaaaaaagcagtgaaaagacggagatcaaagcggccggaacggaaggctcggcttcttcatacaacgtctccggggcagataagtataagcttgaactgattgcttctgacagcgcatggatccgcgtccgtgatgacagcggcggttctttaaaagaaggaacgctgcaaaaaggcgaaacctttaaaaaagacgtcacggatcaaaagcagattgaaatccgcacgggctatgcccctaacctgaaaattaaaatcaacggagaggttctgtcctatgaactcaatccgcatgatgtgatggcgcagaccatcacaatcaagatgaaaaaataaaaggggaaaaagtcatctgaacgattaagatgactttttcttcacgtccgagtacatattattggaggggctttatgtttaacttaccgaataaaatcacactggcaagaatcgctttaattcctgtatttatgattatcatgcttgttccttttcagtggggcagcgttcatataggggatgaatcgattccggtcgcgcatcttacgggagctgttttattcattatcgcatcaacgactgactgggtggatggctactacgccagaaaactgaacctcgtgacaaacttcgggaaatttttagatccgctggctgacaaactgctggtatccgcggcattaattacgcttgtgcagtttgaccttgcgccggcgtggatggtcatcatcatcatcagccgcgaatttgccgtaacgggattaagacttgtactggcgggaacgggggaagttgtagccgccaatatgctggggaaaattaaaacatgggctcagatcatcgctgttgccgcgcttttgctgcataatcttccgtttgagctcgtttctttcccgttcggcgatatcgctttatgggtggccgtgctcttcacagtcatttccggctgggagtattttgcgaagaactgggatgcgttaaaaacatctaactaagaaagaaggacttaaagatggaaatagcaaaaaaagcagaaatcattgcagtcggctcggagcttctgctaggccagatcgccaatacgaacgcgcagtttatcagtaaagagctggcggaaatcggtgtaaacgtgttttatcataccgctgtcggtgacaatcctgagcggcttaagcaagtcatccgcattgccgaagagcgctcagacctgattattttttcaggcggcctcggaccgaccaaggacgatttgacgaaagaaaccattgcaaacacactggggcgcccgctcgttctgaatgacgaagcgttccggtcgatcgaagaatatttcgcgaaaacaaaacggaccatgtcgccgaataaccgcaaacaggcgctcgtcattgagggctcagacgttttggcgaatcatttcggcatggcgccgggaatgcttgcagagcacggctcaaggctttatatgctgcttcccgggccgccgagcgagctgcgtccgatgtttgaaaatgaagcgaagccgctgcttcttaaaaagctcggttctaatgagaaaatcgtttcaaccgtgctgcgttttttcggaatcggtgaatcccagcttgaagctgatttagaagatattattgatgcgcagacgaacccgacgattgcgccgctcgctgctgacggagaggtcacgctgcgtttaacggcgaaacatgctgacgaaaaagaaacagaacggcttttaaaagaaacggaagccgccattttagaacgtgtcggtgaatttttctacggatatgatgatacgtctctggtgaaggagctttcaaaagcatgcagacaaaacaaaatcacgatttcttctgccgaaagctttacaggcggcctgttttcagagtgggtgactgatttaagcggtgcgtctcaactatttgcagggggtgttgtctgttattccgacagcgtgaaacagcatgtgctcggcgtgaaagctgagacgctcgcagaaagcggagcggtcagcaaagagtgtgcgaaagagcttgcagccggtgtgagaaagctgaccggaagcgatatcggcatcagctttaccggggttgcgggtcccgacccgcaggaagggcatgcgccgggccgcgtctttatcggcatttcggcggaaggaaaagaagaggtgcacgaatttaactttgccggctcaagaaccggaatcagaaagcgcgccgctaaatacggctgccatctcattttgaaaatgctggatcaaaaataaagttttaaagaggcgatttctctgatttttaagttttacaagggaaattatgctcttttgcagaaaagcgaacgcggaaaaaatccgaatatgcgttcgcttttttcttggcaaatgccagtaaacaaggtatagtatatgtagtggcaagataaaggaggaaaaaataaatgagtgatcgtcaggcagccttagatatggctcttaagcaaatagaaaaacaattcggcaaaggttccatcatgaagctcggagaaaaaacagatacaagaatttcaacggtgccaagcggttcccttgcacttgataccgctctcggaataggcggatacccgcgcggacggattattgaagtatacggacctgaaagctcaggtaaaacgactgtagcgcttcacgcaatcgctgaggttcaggaaaaaggcggacaggcagcatttattgatgctgagcatgctcttgatcctgtttacgcgcaaaagctcggtgtcaatatcgaagagcttctgctttctcagccggatacgggagagcaggcgcttgagattgctgaagcgctggtgcgaagcggagctgttgatatcgtagtcgttgactctgttgcggcgcttgttccaaaagctgaaattgaaggtgacatgggtgattcacacgtcggtttacaggcgcgtctcatgtctcaggcgctccgtaagctttccggcgccatcaataaatctaaaacaattgcaatctttattaaccagattcgtgaaaaagtcggcgttatgttcggaaatccggagacgacaccgggcggccgcgcgctgaaattctattcttccgtgcgccttgaagtgcgccgtgccgagcaattaaagcagggcaacgacgtcatggggaataaaacgagaattaaagtcgtaaaaaacaaagtcgctcctccgttccgtacggctgaagtggacattatgtacggtgaaggaatctccaaagaaggggaaatcatcgaccttggaactgaactggatatcgtgcaaaaaagcggttcgtggtattcttatgaagaagaacgcctcggtcagggccgtgaaaacgccaagcagttcttaaaagaaaataaagacatcatgctgatgattcaggaacaaatccgtgaatattacggtttagacaataacggtgtaacggacaaagcggaagaagttcaggaagagatggaattagaagaataaaaacacgatcaaaagagcggaataagcaatttccgctcttttttttgtgtgtttcaaaaaacactggctgtttcggaaaattttatctggaatgttacaacttttttcacacttcactcgtctaacatcatggcgaaagttgaaattatatctgaggaggaaaaaagatgacgagcccccgccgcacaagaataaataaaaaaagaaagaagaagctgatgaaaacgggagggctgtttctttttctgctgcttgttactgtttttattatgatctggaccgtcacagcgcatcaccgggagaaggaatccgttaaaagcgctcccgccgctcaatctgatacttcaaaagaccagactcaacagaaaaaagaaaagacgcaaaaagagaaaacacctaaatcaatcgatcacaataaacagatcagcaattacttgcaacaaatcgggttcagcggcacagcaatgatcgtaaaagatggaaaagttgtgctgaaaaaaggctttggctatgcggaccgaaaacaaaaaatgaaaaacaatccggagacatcatattatatcggttcttcccaaaaagcgttaatcgcgacggctgtcctgcagcttgaagaaaaagggctgctgcagacgagtgaccccgtcagtacatacttgccgaattttcctaacggcacgcgcattacattgaaaaatctgctcaatcatacgtccggcataaacgggcatattgagggtcagggaccgattgctccaattgatttaatcaaggatatagaataccgcggaattaaacggcagcccggggtttgggattacagggattccaactattcagtgcttgcttatatcgtatctcaagtcagcggggagtcttatgaacaatatataaaagaacacgtgttcaaaccggccggaatgaagcatgccggattttacaaaacatttgccaaagccaaatatcctgccgtcggctacaaagtcgatgagagcggcagtcttgtaacgccgcaccttttggacttatcgcagctgtacggggcgggcgacatgtatatgagcgctgaagatctctataaatttgataaatcgatcgtaaacaacacgctcctttcaaaagaaagcttcacaaaaatgtttacagcaggaagcagtgccgcttacggcatggggttttacattgatccgggaagctattccaatcacggtgttatgcccggttacaacattttgaacagcttcagccattcagcaagcaaatatgtcatattactgtcaaacattcagaataacgccaaattaggacaggtaaacaatagaatttaccaattgcttaaccaggcggactaacagagccgtcattcacgaaaagcggatgaaggtatggtatgatatatacatgggcgaagatccgagctgaaggcgaatcgttaagctggcaagcttgacaagtatttccgacacaattacaatgaagttgtaacatttgtttttttaacatgattgttaaaccatttaaacttgacaagggcatgagagactcattccctgtgaaggttctgtatgttgagaaaatcagacaatgtacatgccggcacttatttaagcaaaaaccaagttcatagcaagaggaggtgaaagtatgaccccaatgacggttctcatctccattttgctgactctgctcggtttagttgttggctactatgttcgtaaaaccattgccgaagcaaagattgcgggcgcacgcggtgctgccgagcaaatccttgaagatgcaaagcgtgatgctgaagcactgaaaaaagaagctctgcttgaagcaaaggacgaaatccatacacttcgaatagatgctgaacaggaagttcgtgaaagacgaaatgagcttcaaaaacaagaaaaccgtttacttcaaaaagaagaaaatcttgaccgtaaacatgaaggaattgataaacgggaagcgatgttggagaagaaagatcattctctgaatgaacgacaacaacatattgaagagatggaaagcaaagtggatgagatgattcgtatgcagcagtcagaactcgaacgcatttcgagcctgacacgggatgaagcgaagcaaatcattcttgaccgggttgaaaatgagctttcacatgacatcgccatcatgacaaaagaaaccgaaaaccgtgcgaaagaagaggcagataaaaaggcgaaaaacattctgtcgcttgctttgcagcgctgtgcagcagatcatgttgccgaaacgacggtatcggtcgtcaatcttccgaatgatgagatgaaaggacgtatcatcggccgtgaagggcgtaacattcgtacgcttgaaacgcttacaggtattgacctgattattgatgacacacctgaagcagtcattctttccggatttgatccgatcagacgggagacggcaagaatcgctcttgataaactcgttcaggatggccgtattcacccggcgcgcattgaagaaatggttgaaaaatcccgccgtgaggttgatgactatatccgggaaatgggtgagcagacgacgtttgaagtcggcgttcacggactccacccggatctgatcaagatcctcggccggttgaaattccgtacaagctacgggcagaacgtactgaaacattctatggaagttgcgtttttagccggtttaatggcttccgagcttggagaagatgcaaagcttgccaagcgggccggtcttctgcatgacatcggaaaagcaattgaccatgaagtggaaggaagccacgtggaaatcggagtggagcttgcgaccaaatataaagagcatccagtcgtcattaacagtattgcgtcacaccacggagacgaagagccgacttccattatcgccgttctggtcgctgccgctgatgcattatcagccgcaagaccgggcgcgagaagtgaaacgctcgaaaactatatccgcagacttgaaaagcttgaagaaatctccgagtcttacgaaggtgttgaaaaatcatttgcgattcaggccggccgtgaagttcgcatcatggtcaagccggactccattaatgatttagaagcccatcgtttggcacgtgatatccgtaaacgaattgaggacgagcttgattatccgggccacattaaagtgaccgtaatcagagaaactcgagccgtagagtatgcaaaataaagtgatgcttagcgcatcactttatttttttgagtccctgaaaaggaaggaatggaatgtatgagaattttatttatcggagatgttgtcggttccccgggccgcgacatggtaaaagaatatgtcccgaaactgaaagcgaaacataaaccgcattttacaattattaacggagaaaatgcagcacacggaaaaggactgacggaaaagatctaccacagcctgatggaagcgggagcagatgccattacaatgggaaatcatacgtgggataaaagagagatcttcgactttattgatgatgtgccgcatcttgtccggccggcgaatttcccggaaggtacgccgggcaaaggcattacctatattaaatcgaacggaaaagagcttgccgtcattaacttacaggggcggacgtttcttccgccgcttgatgatccgtttgctaaagcggatgaattaatagaagaagcgaaaaagcgcacgccgtacatttttattgattttcacgccgaagcgacaagcgaaaaaattgcgatcggctggtacacagacggaagagcctctgccgtggtaggcacccatacacacgtgcaaacggcagataaccgcattttgccgaaaggaacggcatatattactgatgtaggcatgacgggtccgtacgacggaattctcggtatggacagagaaacggtcatcaagcggtttaaaaccaatcttcctgtccggtttacggtggcggaaggtaaaactacgctgagcggagtgctcattgacatcgacgatcaaacgaaaaaggccgtaaatatcgaacggatattaatcaatgatgaccatatgttctttgaataggtgatcatgtgtttattttataaaaatattaaaaggaaaagcaggaatatagcaacttcttagtgaatatagtaaaaatggaaggtagcccgctatttttgaaaagcattgtggggatggctttttggatagcaacatctaataatgattgttctaatgaacactcacttatccattgtaaaactaagggggagcagaaatggaaatcttaaaagtttcagcaaaatcaagtccaaattcagtagcaggcgcgcttgccggtgtattgagggaacgcggagccgccgaaattcaagcaattggggcgggtgccttaaatcaggctgttaaagcggttgcgattgccagaggctttgtcgcgccaagcggcgtagatttgatttgtattccggcttttacagatatacagattgacggagaagaaagaacggcgattaagttaatcgtcgaaccccgttaaaaacaaaaacatgacattctcaacctgcttgcgtaaggcgagcgggttgtttttattgttgtcatattttctcacaatattatattgatagtacgaagagatgataaatggctttattcatataatattcaaaaaaaatcatgcccatttttccggacggaagcagttgttttcttggagtggacactggtatttacctcctttttatatcatgttacaatccagttattacagtgttttttcgaggaggagtgtacatgttgggaggaaagatgaaagctatcgtcaaaaatgaaaacgctttcggagcaactctgaaagaaattcccataccttccataaatgagaatgaagttctcgttaaagtacaggccgcatctatatgcggtacagatgtgcatatttataattgggatcaatgggcgcagaaacgaatcaaaacacctcaagtattcggacatgaattcagcggtatcgtagcggaaacgggcaagcacgtcacaaatgtcaaaataggtgactacgtttcggctgaaacccacttcgtctgcggtacttgtgtcccttgtttaacaggaaaacatcatgtgtgcacccatacaaagatcctcggcgtagatacagccggttccttcgctgaatatgtcaaagtgccggctcgaaatgtttggaaaaatcccgctgatatggaccccgccgtcgcttctgttcaagagccgcttggcaacgcggtgcatacggtgctggaaagcagccg

SEQ ID NO: 21 - DNA, 68140 bp, Bacillus amyloliquefaciens
agagattggtattgtgatagttgtcggtgttacggtcattggagttgcttccgatccccccgccaattcttttaattcttcctcagtcattacttccaatgctaaaaattcttttttcattaaaaatccccccgattgttttttatacttgcctttgcggacatgcgcagcctactgtgatagttggacaaatatgatttgtgattggatatgttgttattgatactgagttttgccctccaacaagctcttttaattcttgttctgatgtttcatacaacgcgctgaagttctttttcatattccatatttcacctcctttcaagttaataagtctgctgcagctgtgattcatatttggtcttaatggtctttaagtttccattttcaatctcgtagacagattcggagaattcgagccattcggttctatgagtaatagaaattacagtgatatcctttttgtaaatattatttaatatatttaattctgtatccttatccaaattgcttgttccttcatctataaatagaatttgcggatttttcgctaatactctggctattgagattctctgccgctgtccacctgataaggtaataccgttttctccaatcatggtatgataccccatgggcatttttataatatcctcatgaatacatgcttcttttgcagcttgtacaacttcttccattgttattttttcattgaaatattttatattatttataatagtgtcattaaacagattgacatcttgaacaatataacctaacgtttctctcagcttaaccatattaacgtcctctattttgaattccccgtagcaaatttctcctgctgttttttgataaaggccggcaatgattttaatcaaagtagactttccgcatccggtttttccgattaatgtgattttttctctcggccgaatcattaaatttatattattcaaaatataattgtttccgttgtagctgaaatcaatatttttcaagctgatattatgagcggccgggttaaatagttcactgcttttatcatttacttcctcatctttttcgtccagcacagcttcaacgcggtctaccatttcttcgactaatttaatagactcaagactgccgataattgatccaagcggtgacataaaccgtccggcaatgttagaaaaagcaattactgctcctagcgttaggcctattgatgctgctgaccaagtacccacaattaaaataagtaatggcaaagatagattgattgcattggagaccgcacccagtaaggatgaataattcattctttttgagaaataatctagttgatgattaaagttataatttaattggctttcaatattccttgtctctcctattgtttttataaacgtcatggatcttaaaatttcgattagctggctctgaaaatttgattgactatttatttcctgttttgtgaacatttcaattttcggaagcaaaattttagtactcatcacctgtatagctgctcccaataaaactataaaagataatatcggggaataaaaaaacatgactatgaaaaatacaaatataagactgatatctaatatcaaagtagacgctaacctggaaatgacttcacgaattacagcaatgttatggattctagttgaaatatccccggcagtattcgcctcaaaaaactttaatggaagactaaatattttatgaattattttatcagtcatactcttattaatttttaattgcagtttgataataaatttcattctgattaaggacagactaaagaataatacgattgaaacaataacaatcatgaaaagcattggtatgggaagaattttctcattcccgtcaataaatgaatcaataatatattgagtcaaaaaaggggtcattaagtttaatgcttgaaaaataaaagtgaaacttatgataacccccaataattttttatctttcaaaagatattttccgatctttctaaatgaagacacatcttttaatgacgaagcagtcttatcctttctctcaagttcgttctttctgattaacataatagaaatgccattatagaaggttttgaactcttctaatgtgattgtcagtctgccagacgaagggtctataattttaacgttatctgtgccaaatgcgtcgacaactacaaaatgattatgattccaatgaacaattagcggatggtttttatttaactctttaagctgcattatattgtctgtgcggaatgctttgaaatcataatcgaatgtttcagaaatctttttcatttcaattaaatcagtgccgtctcttccgataatttctttatttaatttcaatttgttaggattgatttttattccctcagccctgctcaaaaccatggctaaacaagtaataccgcaatcaaattgatttctttgaagaataaccggaagctttctttttctaattttcataaatgtctcctaatgtatctacacgtcctatttcaaggttgagaatattcggcaattccgcgtctgctgcatacagcattccatatacgatccccgccaaaccaagcattaaattaggtgtttcaacatcccttcccactccgcattggtagaaacctatatttttgtcttgtacactctccaaaatcaagttttttccgatatttacaaattgactttcgccagtcctttttccatattcgatcagtattaaagcatttcccatgtctccgtgacagaggctttgctctcggccaaaaccgtcataaaaaatgttagaaacggttttattcagatcttttttggccacttcggaaatatcagagtgttttgaatctttcaattctaatctgcttaatagaattccaggagatccatggcaccatgcagatgttgcagcttcatttaccgtttttctcagatcaagccagttaccgtttactttttttgaattttcaaaagcaagcccttttcggatgtacatacttatatcttgatgttttgaatgtttctcgagtaattgaagggcatatatcattccagcgtttccatgggaaaaacccgttaacggcttatttgcaataccttcccaagtgacaaaatcctcatcaagaaagatcgcttgtttcattaaaaatgaaccgcattgttcagccaatgataaaaagaatgtatcattctctatttcaaacgaacgtatcattacaataagagcccccgctgtgcccccgattatatccaattctttatcataaggaagcaaagacggaataagctgagcgatttgttttgcatcctgtttatatttttcgcgcttagtatacatatagaaattcattaaagtatatactattgaagatactccggaaaaagcacctacagacatactgctgtcttcgtccggtttcacctcaatatcaataaaacgagagacgacatctttcataattttttcggcaatgtccagatacttttcttttttcgtgacgcgccataaagccaggtaggtgaaagccatcccggaaagcccgtcgtaaaaggtatcacccataacggataagttccattgaatttcatcaactccaataggagtagcgttaagccaagaatacgaacttcctttatctgtgtgtgcattgtaagattgattataaatataagcggccaattcctcagctttttctattaagatactttcttggttactactgaaaacatttacatattgtcctggttcttttgttataaattctttcaaaacaatttgccgatcatcctccgaagcaagcatggacagttcgataacatagagctgaaactttaaatcgtcttttgataaatttgaaattcgttcttttacactttgagctggtgtttccggaaagtaattttcaattttcttattttttgagcttagtaagtctttctcattcaatttcactttgaaataaggtatatcattattaattaaatcgttgaactcatatttaacaatagattgatattcatcttcttgctttggtctctcccatatttttgataagaaaatttctctatcaatagagttgtgtaaaaatctaggatgaaaacttaattctaataaagcagaatactttattgtcggttttgatataaaccgaacatatatcttgttttcgctcttttctattatgcgaatcagctccgaagcatgttttaatatagtcatatatgcttttgaaaaaccttgcttcagttcttcgacataatcttttgcatatacaaatttattctcaagcatagggtgattattagctgtatcaatttcaacatagtctcgtttgaccgacatttctgctgtctttaaattgataagctgaggaactttaatgatcgactttactttccctttccggcctattccgctgatgtcggctttgcccccaaagaaaaaaggaagcagtcctaatgctctgacagattcatgaagctgtgtttcagctttttcataagcgtccatcccgtccttttttttctggtatgcaggatgaaataaggattccaaatcaatgagaactggatagctcccgttggcaatgagattttccgaatgaaaatcaacggctttcaatgcatataacaaaccgatttgagctcctgtacgctgataaaagttttgaatatcttttagacaattgcatgctttaaaagatataaattcagtccatccatatccgtctctgctaaggacattcggagtactcaattttatatcatgatctctaattttctcattcaaaaattcaattatctttttatataatagatcaatttctaaacttctcggcttataaataagcttgccttcatttaatgttattttagtaacctttctcccatcagaatgagaatcacccattcctacttcaatgtcccttattttgacttgttctgaaaaaccaaataaagagagcagttcaggcttgtccttttcaaaacgcgagataaattccaatatgaattttttaaattttcttagttcgtttccaatcactcttaataagactggatattgttgaaaaaagcttttaagatactccggactgcacaaaagagttttattataataaccatatttttctttaggagtctcccctgccaaaaaacctttttcccgattcatattcatatccaatacaagtgttctataggatacttttaaaatgattttttctaattgatttgaaatactatgatgaaaaagagccggttgttccagcagatagtcataagaaggaaactttgattttttaagtagatcattgaagtaagaggacacttttaacgcaaaaacgtgaaacatgatttcttcatttacgtcttcttttttaatagcttggtgagcgatccctttttttaggttttcgaaaacatgaactgtaaaagcggatttatgtaggggggtttgatataagtttttcactttatcaattgattgaatggataacacattattaatgctttcctgggccatttgaatatcattcttatagattaattctaagtttcgatcaaacagattctcattttcatcagattgagagacagcagcttttttttctttacttaatagaatattagttagcgaattcatttaatattcatctccttttaaaaaagagggagacagctggatctcccagagcattggaaatctattttcttattttcggatttgttttaacaccagcaagtgtgagtagggcaaagaccgcattcccaagttaacgtacaaagcttaccatcatttccttgagaaatcccccgctgttctgcgcctcctcctccgctgaattcatttaaagaaatttcctcaagttcttctcttaaatcaccggcaaaacgatacattttctcattcactaatattcctccccttgagtttttgaaatatattggatttgaatccatatatttctataaatctatgataaacgatcttttacctataggcaccgaaaagtcatattcggaaaagcgctttttttttgcgcgtttccgaagtataagttataaagaaaatcgggattaactgttccgttaatcccgattcacttactcatatatagttttcatagaaattaatgaatatcgatttgctttgatcagcgcctctgttctggattttactccgagcttgttgtacacaccagtaagaatgtattcaaccgctctttgactgatcaacagctttgctgataattcccggtttgtcattccctccgctacgcccgctaagatatcttgttctctttcatttaaagtaatatctcttattctatcttcaagcttatcaatgttgaacgtatttgcttctgttcttcttaattgtttaaagagatgagtaggaataatggtatctccctcaatgacactttcgattacttttatcatatgctcttctgttgaagacttacttatgaacccggaaacaccaacttcaaccaaaagattgaaatggacagagatatcaaaaccagtataaattataattttttgatcgggactctctctaagaatcatttttgacaattccattccatttaactccggcatatataaatcaagtaaaagtaagtcatactcgtaatgcttaaggtgattaagtacttctttacagcaagacaatattgttactcccattttattgcttttttcaagaatggcttttgtcccttgagcaacaccaatatgatcatcaattaataaaatctttatcatgtcagcgctccctattcatttttcgtacttatttcaaaccttaacagcaatccttcatttacgcctgaagatatattatgaataccattcatacaatttatacgctctttgatccctgtcagtccaaaactgtttgtttttgaatttactttattccaatcaatgccgattccattatcttcgtaaacaaacataagacttgtttttttttgaatcattgtcaaaacaatataactggcttttgagtgtttaacagcattagtaagcagttcttgaacaatccggtaaaagtttattgtgatatcttctgtaaaaatagaatcatcttttacatctacaaagaattcaatatcaagctgatagttgcttttatgtttatcaatcaggacttgaatgcttcgaagaagtcccatctccattaaaaaaggtggtcttaaatcaaaacatttttctcttatatactggatattgtccagcaaaatttctcttatgtaataaatatccttgtatttctcaacatgatactctaattctctgcatacaaatatcagctcttgaatgatagagtcatgaatatcatgtgcaagcttggttctctctatttctgaaatagaaaataaaaccttagaaagtacagctgacttacatttatgttgatcgtctatgataatttcatcaatttttttttgaatcaacaatttgttctgaagtgcagatgctgtgcagaatgccagcattcgcagccaatctgcttcgttttcacgaatctttatagggtgtcctttatgtgataaatgaataaaaacaaatgtatcacacttctccccgataaacagaattgatccgctggcggtttcacgtatttctcctattttaagatttgaaatgtttatgttaggaacctgaatgtgatttcctttcaattttaatgtttttttgtcatagtttataagagcaatctgctttcctgaaaacacactttgtatttcattggttagttcttttatcaattgatctgcatcggatccctcttggcataattctgaaaaacggaacaggctgcgaagatatgtcttatttctgtcatcataggtaaagcataaacaactactgccgaatatacttagaacaaaaaatagactatactgtttaaactgtaattggctgcctgttataagcaaaagcataaataacaataataaggagaaaacaaaagcccttacaaactgctcaatattaagcttcacccaattatctttcatttgtaaccaagccccttactaaggaaaataagggaatccctttgaatccccttaaaatgaaaaagttactttacacttattaaaatataaacagcaaaggcaacaatgtataccagaaatgatccagtcataaattttacaggttttcttgaaaagtttagtactcctcttaatccgtcattcaaaatcattccgaaaaaggtaaccagtgtaactcctaaagcgagcattgaaatcacaaaaataacttgctccatgtatactcatcctccatttacattctgttttttttcgaatatacgtataatcctgataaggacaccaaaacatacagccccatgatcagtaatccccaaactaaaagaattgaatcggaatatcccatatcactttcaaaaatttgaatactgaaacgataaataaaagaaaaaggaaagactattgagacatcacttgctaacagtatcgtcattattaaaaaggaagctacaccggttatcatgacaaccactatatttttacttaagaaagcaattaaagctgcaatcgggatggttagcaggctcaaagtagtagaagtaaaagatgtcgctattaatcttaataagtcgcttgctgagacatcttcccgaaaaaagaaaaacaaggtggataagtgaataatatgattaacagctgaaattaaaaacaaaaatagaaaagatgcagctagctttgataatatcaatttgaatttatgatacggatatgacatccaattcagcattgtcctgtttttaaattctaaataaaaataaaaacctgaaaaaataaaaataacagttggaaaaaggattgaatactgattaaaaacaaacatataaaatttgttccaatctgtattttcgttcatagccaaaagaccgattccgtttatgagaaatggcaaaaaacttagaaagaaaataacataaattgatttcagtcttttaagttttagaaactcgttacgcactaacagactcatgacctttctcctttgccagcagttttaaataaagatcttccaaagatagcttaaatccgtcaatagattccttgttaaatccacaagaatttaatttctctttcatttccgacggatgaattactgaaataaactcgaattgctgtttattccttgaaataacatgatccgcaaatttctcaatatccgcccaattaatacccgcttcagctggaattttgtataaataaagatgttgcgtatttttcataaaggctgactcgaaaataatctgccccttattcataataagtaattcatcggccatgagattaatctcacttaaaaggtgacttgagataacgactgtggttccatttttcattacttcttggatcagcatttcacgtacttctttaataccatatggatctaaaccgttcgtcggctcatccagcaaaagcaatgcaggagcatgcgcaactgctctggcaattcccagcctctgtttcattcctaatgaagtttgcgaaaacagtttatctttatgttcaaaaagtccgacctttcctaaaatctcatttatctcttcatcagaagctgatctttttaaatagttaagatgtaatttaatattctcaaaaagagtcaaattttcataaaagccaggaaattctataatacttccgatagactgaatcacatcattatttggattgcgatataagttatttccctcaaaaatcacttcacctgaagttggaggaaatatgcctaaaagaactttaagaaatgtcgtttttcctgcaccgttgggacctaacaaaccatatattttacctttttccaatgttaaatttatatcatgtaaaatttctttcttttttatagaaacattgatacctttggatattaaagctggatcagcctttcccacttttcatcattcctttccgccttgttctgtttataatataaacttacgaggttaaaaagaagatataatcaaggttaatttacgtttaaatttctcaacataaaaaatacgtgaagcctctacggcttcacgtattcactgctgtttggataaataataaaaatcgctccgttttgattgctctttattttatgttcaagtcccatttgtttaagcatcatattaatgatcgataagccaatcccggcgccttttctttcagatttattattcattcccgggcccctatcctcaattatgattgcgggtttgttttcaattagctttgtctgtacggaaacgtattttcctgaatgagcatggcgcaaaacattttgaaaaatgttatcaagaattctcttcagccaagtctcgtctatttcccatacgatgttttccttcagatcaatatctattgtaaagtgctctttctcaaaaatcggataccaagctgttaacgaagaacgtattatctttaatatgtcacaactctttttatgaagcggcaatttacctgcggcaagaagagaaaatgatgacaaattgtcaatcagttcgcccataaacgttattttatcgtttatgatccctaaagaatgctttccattttcactgcttatttcattctttaacgtaaatgtatgccctcttataaccgtaagaggggttcttaaatcatgagataaatcagcaatcaagttttttcggatttcgccttcttcgcgctctttttgtctgctgttccttagttcctcaaccatctggttgaatgaatattctacttggcccagttcatccttctgtttaactgttacaaattccggtatgccgtcattatcttgttttttcatatgattccccaaagaaattaaccttttttgtattttcgcaaaaaacatccatgaattaatcacaaaaagtgaacagacaaaaatcaaggcgataaaccatatataggaatacttagctctcataacctcccattgagatcctataattgagcgcggagtttctaaaaatgcatatccgctgtcttcactcccatttacataagcactcagcaataaatatttcttttggttttgttctatcattttaatcaattcgctaacgtgaataacctcaccctttttggccaaccgttctgagttcgaaaacatcacctttcccttatcatttatccatacaatatcagagtgtttatattgcttcatgtgcgggaaagcagacgtaatttcccgattggatttccctgaaaaatcttccacatcagacttccaatcactttccaacttatttggttcatagtgtacttgcccctggtgatcaatcaagtatgttaatgtgacatagtatagaaaattcacgcctaaaaaggctatcgggaaaaacaaaattgaggcaacgatattaataaggtatttggttgataatttcattgtttgatcctgtatccaatccctctgattgtttctagaatttccggctcatttggattaatctcgattttttgccgtaaatgccggatatgtaccatcaacgtcttatccccttcgatatagggctgttcccaaatattttcataaatttgttcctttgttaatatttgattgggatgtctaagtaaaagcaaaaaaatccttaactgcttatcagttaaaaatatttcctcatgagtttgatgatttaaaattcttttttctttcaagtgaacacttaagtgttttagcttcaattcatgaatggcagtcttgtcaaatcttcttaataatacttcgattcgagcagccagttcatcgggatgaaagggctttgtcacgtaatcatccgcaaatcctaagcctttcagcttatcttccagacccgttctggctgttaaaagcaagagcgggatctgcggatgtgtttttttcatcctttgaccgattgtaaatccgtctaaaccgggcatcattatatcaagcacgatcagatcagccttttctatatatgtttcgtaattataggaagaagtgagccatataatcatatagccccgatcttctaaatcaccctttacaaattggccaatttcttggtcatcttcaatgtataaaatgttattcattaggaccccctctgaaatatgtgactgaaaatcaaccttccataataattatatatattataaaaatctcctttatgtaaggcaccattccattattataacttatagatattcacaattcatcaaggggcaaaacgataagtcaacggcgaaaaggcggtctgttgtcagatcgcctttccccttataacgtcacaccggacttaaagattgcaagctcccgaaaatcgtttttttcgttattgacgcattctccgcttgcaactttaataatgtattgaataaaatctcttacaatgtgatcttctgttgtttggtcttccgccaatctgcccgcgttgtaatcaatccaatgaggctttgattgaaataaatcggtatttgttgatactttcacagtcgggacaaatgtgccgaacggcgtgcctcttccggttgtaaacaaaacgatgtgacagcccgccgctgcgagcgctgaagaagcgattaaatcattgccgggcgcactgagcagtgtcaatccctttgttttcagggtttcaccgtatgtcagcacatcagaaaccggtgcaagaccggctttttgggtgcagccgagcgacttgtcttcgagagttgaaatgccgccttccttattccctggtgacgggttttcataaatcggctgctcgtgcttcataaaatattgcttgaaatcattgatcaatcggactgttttatgaaacacttcttcgctcgccgcacgctgcatgagaatcgtctcagcgccgaacatctcaggcacctccgttaagaccgtgctccctccctgtgcaatcaagtaatctgaaaatctccctaataaagggtttgcggtgatgccggaaaaaccgtccgacccgccgcacttcaatccgatgctcaattctgacagcggaatctcctcacgtttatctccctttgccgcaaggtgtatctctttaagtagcgcagtccccgcttcaatttcatctgtgacagcctgtgattcgagaaatttcacccgatctccattcacttcagaaagcgtttccttaatcgccgccagctcattattttcacagcccagccctaaaaccagcacaccgcccgcatttggatgacggatggcgtttatcagcatttgtttcgtattctcatgatcatcgccaagctgggagcagccgtattggtgctttaaaaccagcacattgtcaaagggcgcaatgtctttcgcctcttttacgaagcgctgcaggattttctcagcgacgccgtttacacagccgactgtaggtacgatccacagttcattccggacgccggatgtaccgttttctcttttgtagcctttaaatgtccggttctcatttgtaaaaggattgtcctcgaagcgcggtgaatacgtgtattcttgcacatcggataaattcgtttgcagattatgggtatgaatatgctcgccggccgaaatccgccttgtcgcacgcccgatcgaaaaaccgtatttaatgatgctgccgttttcttcaatggtttgcagcgcgattttatgcccccgctttacagggtccttcacttcaatcgtcagtccgtgtgtatgcagccgctcccctttgttaaaatggcgcatggcgagaagcacattatcgtttttatggatttttatgacctctttcatttcacttccccctttttgccgcagcattcatgtaacgcatgcttcataccccgcttatgaatgacagacagaaaaaaagccgttcgttcagtcagccccggaagatgattcagattcttcccccacaatcgctcttctcctaatatggcagatgccgcttgaaacatatcatctttgcaacgggaccgcgccatttgaaaacggttaagaacctcctcgccgtcagccggtttgttcggtccgttccagtatgaatagatcatggcgctgaacgaaaataccagcttctcaggtagccggccctcctgttcgatataagccttcagcgtcggcaggtttcttgttttgaatttcgcggcagcgttaagggtaatgctttgcagataatgttggatataagggtttttaaaccgctgtaacacatctgccgcgtattgggtgacaccctccatttgcagcacagggaggatttcttcattgatcagctcttcgatgaatctgcccgtcacctcgtgctcagccgcttcccggacggtttgcagtccgtatagtaaagccactggcgccaatgccgtgtgagcgccgtttaagattctcaccttttttgtcctgtaaggcgtaaggtcagacgtgatcagtgcgttcagcccggcctcagcaaaaggaagctcattctgaagctgttccggcccttctatcacccacaaataataatgctcactgaccacaatcagacggtcttcgtatccgagaaaatcggtaagttcttccgtggtatcaacaggaaatccgggaacaatccgatccacgagagtattgcagaagatgttcgcgtcatgaatccattgagtaaaatcaggctccagctcccacagcccggcatattgaagcacggcagccttcagtttccgtccgttttcttcgaccagttcacatggaagcacaatgcaccctttctcggcgtcacccgcaaatgccttatagcggaaataaaggaacgccgctaatttcccggggaatgttttttgaggtctatcctcaagccggtcgcctttctcaaacgtaattcccgcttctgtcgtattggaaatgataaaacgaagctcctcttgtgctgccagccgtttaaaggaatcatagtcagaaaaaagatcaatgccgcggctgatggatttgacgatcatgtgttcttcagccggttttccgtcctttatcccccgcaaaaaaagcgtaaacaaaccgtcctgctcgtttaaacgtttgattttctcagagcctctcggctgtacggcgacaacgcttccgttaaaatccgtcaattgattcatttgatcgatctgccagtctgcgaaggcccgcaaaaagttgccttcgccgaactgaaggactttttcaggatattgaatgtattcaccgcacatctttttattcagctgacgcaagctgtccgcctccttctgcatttatgcacacgttaacatttttctgtacgaaaacccggataatcagacgggccgttatgtgagttttttaattgaatctcttatcatcacctcggtgttttcgtatattttttccgccgccgtatccgggtcggcgattagcgccaagatcttctctgcgccgagtatgctgatgttttcaaccgggcgttttactgtcgaaagcctcggcgtcatgtattgggaaatgccgatgtcatcaaacccgataacggatatatcttccggaacgttcaggcctttggcgaaaatggcattcatcgccccgatcgccatatcatcgtttgaacaaaaaacagccgtaggcggtgattgaagcgccaagagtttttccatcgcctgactgccgctttccatatcatagcggccttttacactgtattcatgcttaatcggaatagaatgatcaattaaagatgtcaaatagccttcttttcgctgagaagttgacctgaatccttcctttccctcaatgatcgcgatatctctgtgtccgtttgcgatcaggcagtcgaccgcctgtctggagccttctttatcgtttgacaggatattcgtgatgctccggtcatcaatgtcccggttcagcacgacaagcgggatgtttttctctcggatatgataaataaatgaattatcactgtcgctttggctcattaaaatgattccgtcatatctcatgggcgtaatggtttcaaagcttttcaggtcgtcaatcgcgcggacgaacaaattgtattcctcactgattgtgcggtttacacctttgatggtatcggaaaaaaagctgtgtgaggttccgtttgtgatgcttgtaaaaaacagtccgatcgtatgggacttttgcatggcaaggctttttgcatttacgttcggtgtgtaattcagctgtgaagcgagctctaatattttctgttttgtatgctctttaatgtaggggctgccgttaagtgcccgggatacggttgtgtgggatacgttggcgagttttgcgatatcttttatggttaccatcgtttttcctttctttctgtatgctgtcatttatttctattgtaccattaacggacagtccataaaatcactaaagttgaggttttgcatgatgtaagtcctgaacgagctcggcatgctgccggtccgtcagcttatacatcaaaccgataatcagcatggcgcacgctaaagcgaaagccgggtacagcagcagtagccctttaatcccgatcagcgtgccttttgtctgagatgcattcgggatatagccgataacactcagcccgatgcctgaaagaaaacctgataaagattgggcgagttttctggagaagttgaaaagcgaatatgtcgtcgcctccttccgttcacccgtcttccactctccgtaatcaataatgtccgacacaagcgcccatgtaatgccgtttggtatgctgatcccaataaaagcaatgctcgctaacgccgtaaagatatatacgtttgacgggagacagaaattcagcgcatcagccgcggcgctgacggcaaaaccgatcatcaccgtttgcttttttccgaaacgtttgacgagtttcggcataaacaaaacacctaaaaatgaagaaccgatgatgataaaactcatgtaggacatcagctccgcattgttgagattgtactgggcgaagtaaacaagcatagcggatttaatgttatatgccgatattgagaaaatcgtcatgaaaacgacggtcagaagcggtttgttgccgataaagcatttgaaaaccgacataacggacagcttttctttcggcgcttcacggacgataattctttctttgcagtttcggtagcagatcataaatcccgcgattccgattacggccatcattcccatgactgccgggtagccgatgtgaacgttatcaaaatgaacgagaatcgggatgacgatgacactggtaatgagcagcgcgccgagggagccgatctggcggaatgcggaaagcgccgttctgtcctccgcatcctgtgtaatggccgcgccgagggagccgtacggaatattgacgaaagaataagccaccccccacagcatgtaagaagcataggcgtacacaagcttccaggtgacgctcacgtccggtgacacaaaaatcaatacggtcatgaccgcaagaataatacttccgaataataagtacggcctgaatttcccacggggtccgatcttttttctgtagtcaatggccgagccgacaatcggatcagtcaaagccgcaaacagcttgctgaccaaaaaaatactgccggcgaacgctgccggaatgcctgcgacatctgtgaaaaacttcagcaaatagatctgcccgagatcaaacataaatccgttcccaaaatctccaaaaccataggatactttttctttcagactcagcttatgctccttcacttttgcggcaggtgctgtcacgacaggcacattactcataggccacctctttcattccattttttaaaagcggaaatattcctcagcattccggtaacaaatcccctcgacaatctttcctaaaagctccatatcgtaaggcgcttcgccttgttccgcccagccgccgatcagcgtgcagacaagccgcctgaagtattcatggcggggataggacaggaaacttcttgaatctgtcagcatcccgataaaacggctgaacaggcccatgtttgataacgctttcatttgctggagcattccatctttcgtgtcattgaaccaccaggctgtgccgaattgaattttccccggtgttttcccatcctgaaagctgttgatcatgctggcgataatatagttgtcattcggattcaaagaatacaaaatcgttttaggcaattgccgctttttttcggcggaatctaacagccgggcaagcggctttgcgatacgttcatcattaattgagtcatatcccgtatcaggaccgaggctgctgaacttatttgtattggtatttcttaacgcgttaatatggaactgcatcgcccagtccagttcggcgtaaagaccgcaaagatattgcagcgtccgtgttttgaatttcttttcatcttcaaaagacacatgctctccgcttaatccggctgcaaaaatccgggccgcttcctcttcggtcgtctcggcataaaccatttgatctaacgcatgatccgacactctgcccccggcattgtgaaaaaagcggacgcgggattctaacgcatctaaatacgattggtaggtggtgacagccattccggaagcgctctccagcgaacggacccaatcggcaaaacccgggctgctgatgtccagtcctttgtcaggccgaaatccgggcagcacttgaaccggaaaatcactttctttcaacagttcgtggtatgtcagcgcatcggcaggatcgtcggttgtgcaaatgactttgacatttgatttcagaatgagatcccttgcgccaaacccgtctccctgcaggagctcattcgtttttttccaaattgccgcggccgttttttcattcaatatgtcataaatgccgaaccagcgctgcagctctaaatgcgtccagctgtacagcggattgcctatcgccatcggcaccgtttttgcccaggcgaaaaacttctcttcatctgaagcgtttccggtaatgcagcgctcttcaatgccgttagccctcataatccgccacttgtagtggtcaccgtaaagccatgccttcgtaatggttgcgaaggttttattttcatagatttcctttgggcttaagtgacagtgataatcaatgatcggcatgttttcagcgtaatcccggtacagctttacggccgttttactatccagtaaaaaatcatcacccataaaagctttcacactttcatcctccctcttaaaaatgttaacgttaacaaaatggttcttttttattttagcttcctctttctcacatatcaatcatttttatttaacttttcagaaaaatgtatctgttaacattttcatacaaaaaaaagacactgccgagaaagtccggcaatgtcttctgtgtgatcttaaggattagtaagcgaggctgaataatcctttgatatgtgttaaataacgtacgttacttgcttctttcattaaagatgccggaagacctttcagcggagtagagttcgctccgatgatggcaaccgcgtctttacgtccgaggcttgcaagcgtaccagagtttacaggcttgaatgtttcaagcgtttttccttctaagtaagcgaacaggttgtaaccgacaagttcacccatctgccaagcgatttgcgctgtcggcgggtacggacggccgtccggcgcaaagtatacagcgctatctccgacaacgaatacatcttcgtgagaagtagattgtaagaaatcgttaaccgtcgcacggccgcggttcacttcaaggccggattcaccgactaacgggttgccttgtacgccgcctgtccatacaaatgtgttggcaacgacttttgaaccgtctttcagatcaataacgtttccttcaacatttgtaacaggaagacctgttaagaactcaacgccgcgtttttcaagactttttgtcgcgcgttcgataaggtcatcaggaagaacaggaagaattttcggacctgcttctactaatttcagtttgatttctttcggatctacgccgtattttttcgtaaggttcggcataatgtcagcaagctcaccgacaagctcaacgccagttaagccgccgccgccgataaggatcgttgcatcagcttcgtttttcgttttagcgtattcacgcacacggtcttccacgtgtttgtatactttgttggcatcagcagcagatttcagcaccatgctgttttcttcgagtccaggaatgccgaaataagccgtaacagaaccaagtccgacaacaagcgcgtcataagtcagcttagaaccgtcagaaagagaaacttctttcttatcaactgagaaagaattgacttctgcgattttaatgtcgacgtcttttcctttcagaagtttttcaagcggcatagcaacagcctgttcagacacgttgcctgctgcaagacggtgcagttccgtaatgatttggtgagtcgggtatttgttcacaacggttacgcgtgcttcatctttactgtaatgtttgcgaacggttaaagcagaaagaactccgccgtaaccagcgcctaaaatgacaatatgttttgacatcgtatatcctccgtcctttatatcaatttgaatctgagattatttttgtttttcgttcatgatttcaagatagctgttagcaaaacggaacagcttttgagcttgaggatctttcagcatgcgcagcaggccgaaaagtccgatcgtttcattgcttgcatccgcgcggtcttttgcttcgatcgcagtagccgcaacttctttcgctgtttctttcaccggctcaagaatttctgtaagcgcacccactgtatcgctcttcaatacttcgtctgtcgctacagactgtgcaaaatcataagacttcgttaaaatatttactaactcagtcagttttggaagctgatccactaaaacagtcagtgattcttgaacttcaggttttagcagctgatcaataagatcgcgttggccttggctgacagatgcatttgtttgatcgattgtttctggcatatccgattctcctttactataagcagtatgctgatttttttggaaagggtagcctttcccccttcatgcagaaaagcatgaaaaagcaagattgtgaattcatgcacaatcatttacaaaaataaatgtttactacccagtttttcactttgccatatccagtattatttttatatcaacaaaaacaattgaataagtcaaaatttctttttcctctctgaaaatagcaaacataaaaaacccaaatttgatttactcttatataataacactttttgaacaaaatttgaacgtgaattgtttcgtttatgaaattatttatatggcgggggtgtaataacgtttctttcaggctatttttttacagaccatccgcttttcccctgtcatttttcccacaattttaatagcgggcccgtttttcccgtaaaggggtcgcattccgggagcgggacacagctgatttcttctgaagttctatcatttttctccgtttttgtatcgtactgccggccgcccggataagccccgatcacggtaaaatcagaactgcccgacagttttttatgtccggtgccggccggaatgaccgctgcatcccccgtttgaagaacggcgtccgctccttgttccccgccgaacctcaaaaccgcgtttccttttaccgcgacaagaacttcgtgcgtggtgctgtgaaaatggtgatacggaaatactccgcccgtccagctgttcgaccaatcgtgccggcggaggacggactctgctttctgtaccgtttcttcattaaataccgctttataaataacaagcggaagattcgggttattcggaatgcggccgtcatcttcgaaataaagcacttgaatatcctctttctgcattggtgttcacctccgtatatgtctgtttcccattcatcatttattaaaacgctattttctcatattccattgcgaagcctgccggtgaatagtatagtataaaaaaatatgtgtcaaaatgagggatttaatgaaagccatcgtgatcggaatattggcatctctgttttttgcagtcacatttattttaaacagggcgatggagctttccggcggaagctggatgtggagctcttccctgcgttttctttttatgattccgtttttatttttgatcgtttatgcgaaaggaaaatgggcgccgctctggcatgaaatccgaaaaaaaccgtttttttggctgaagtggagttttaccgggttcgtgcttttttatgccccgattacgtttgcggcggcatatgggccgggctggctgatcgccggcacgtggcagattacaattgtcgcgggtgtgcttctgtcgccgtttttctacgaaacaaaacattcacctgcgggcccggtttccgccagacaaaagatcccgctgatttcgttggttacttccgtcatcatcctgatcggagccgggctgattcagcttcagcatgcgggttctctgtccggccgcacgatactattcagcgttgtgccggtcgtcatcgccgcttttgcctatccgctcggcaaccgcaaaatgctggaacaatacggcggaaaactcgatacgtttcagcgggtgctcggcatgacgctcgcaagccttccgttttggcttttgatcgccgctttcggctggcatagagacgggcttccgtcaatgggacagacattccaatcctttatcgtcgcactcagctctggcgttatcgcaacagtattatttttccgcgccaccgatatggtgaggaatgagccgcagaagctcgctgctgttgaagcgactcaatccggagaagttctttttgcactgatcggcgaaatcgtctttttatccgcggcgtctccatcacttctttcatttgccggactgttcattattattgcgggaatggtcatgcatacattcgcttcccggcagacagaccagaaaacggctgagcaaacgtcagccaatctcaccggttcctgatttttttacgaaaggtgtcatcctgtatgaaagaagaaattccggcaatatctttcctgtcagccggcaaacgctttgaacaaaacaatacgtcctttgatgtcctaagccgtgtaaccggacatattcaaaaaggttctatcacggcgttgatagggccttccggcgcgggaaaaagcacattgctgtcgctgtgcaatctgatgaatacacctgatgaaggggaagtgcttgtattcggaaaagaaataagacactgggacatcagagagctcagaaaaaccgcgggccttgcatttcaatcagctcccgtcatggacggcacggtgcgggacaaccttctgctcgcagaaaaactccacggcgcacagcactatacgcctgaagagctcgcagattttacagatcttccgcgcgggcttctggatcggaatgcaaaagaattatccggcggacagcggcagaagctctcattagcgcgaaccctcgccggactgccgtccatcctgctgctggatgaaatcacctcggcgctggacccgtcatccgttctcatcattgagaaactgatgacgaaactccatcggcaaaaacagctgacgatcctgtggatcacccataaccttgaacaagcggaacgattatccgatacagtatggtttatggatgagggacggcttttagaaaccgcggaaacgaaaacgttctttaaggaaccgaaacatgaaaaggcccgagcgcttttacaagggagcgggtgctgatatgaatgatctttctctgttattgacaagtatatttgtcattatcgctttattcctgtctaaatcttttaaagccggcgtcgaaaaggatatgatcgtcgcaaccgtcagggccgtcattcagctgcttatcatcggctatgtgctgtcgctgatttttcgcggtgatcacccgatatttatcatattaatggtgcttctcatgctcacggccgcttcgcacaatgtcgccaaacggaaaaaaatgcagatcggctcattttggcgcgtttttctgacactggcgatcgcggaaaccgtgacgcagggacttttactgacccttcatatcattccgttcacttcaagatatgtcattccgataagcggcatggtcatcggaaacgccatggtgctctcaagcctgtttttaagccggctcagttcggaagcagacctgcgaaaagaagaaatccagctgattctctctctcggaggaacgcctaagcaggccgtccggcagatattgacgtccagtatgaagctcagtatgatcccgacgcttgaaagccagaaaacattgggtctcgttcagcttcccggcatgatgacggggcagattttagcgggggctgatccgatacaggcggtgcgctttcagctgctgatcgtttttacaacgatggcctccgctcttcttacatgtatcatactcagcgccttgacatatccttcccttttcacggaacactggcaattaaaaaaattcagcagggaagcgtaggctttttccctgctgaatgattatttatgacaaggtcagagattcatagtaacgggataattcaataatcatcgctcccatccgctcaatgtccggagcaagaaccctctttatcccttcatcccggatcgcttcagccgtcactttgccgactgcggcggcaagcacttgtttttcgaatgcctgttgcaattcttttgtgaaccctttttcttttgcataatcaaagagagagcgcacttgaatggctgtcgtaaaacatacggcatcgacctctccgtttaacagctctcccagcagtttatcgaccgtctccctttccggcggaatatgctgatacgggagaacagggaatacctccgctccgtttttctcaaggaactccgttaagaccggcgctttttcgccatgaagctgtatcatgacttttttatctttaaagtcaaatcgttccaaggagcggatcagccctcttgttgtaccgtcttcatctgaggcatgcggcgtgatgccgagcttttttaaggccgcatatgttttatagcctctgcagccgattttcgcttcatgaacggccgctaaaaattcttctttcagaccgattttttccgataccgacaataacgtttccgtgccgatgcctgtggtgaatatcacccagtcggctttttgcccggcaaatgttcttacgtcgggttcaatttgatcctccgccaggtatacggttccttggagggaacggacgaccgccgttccgccctgcttttctattaattttgtgatctcttctgttttccgcgaaccgccgatggcaatccgtttcccgttcaatccttttcccatcgctgttttcttcttcccttcagatgccgggcgccctatggcaggccgtcatttatttctattattgttacgcaatcagccgggaaaatcaagctatgcttccgttgaatcccccgtgcagttgctgtatcattaaccgggcagaacgatttgattcgcggagggactttcaatcatggaaacaaaaaaagagttcgagacaaaaggatacgatacttcggtcatttatgagttcaatgaatatcctgatgttcacagcggccgatgtgacaattgcgactacacgctgtttaaaagctcagtgaagggcggaaaatttttgagggaatgccggagatgcggcatgaagaaaaacatataacaaaacaggcagccgtcttccgatgcgctgcctgtttctcaatcaattttcgacggccgccgttttcaaaaattcttcaatggcgcaaacagcctgttttgggccgccggtttcttctattttctgctgcatgcttttcacgcggctgaggatgtttttatcgccgtatacgttctgaacgtctttttgcaaacgggccacagtgacttctttcggcggcagatgcacgccaagccccaattcatccacacgctttgcggtgacctcttgttcgtgcatttgcggaacgacaacgagcgggacacccgcattcattgcttccattgtactgttcatcccgccgtgagatacgaacagctttgctttctccagcacatcaagctgaggaacgtgctggcggatgataaagtgatcggggacatccgaaaaactttccggatcaattgttgtgccgactgacataataacccgccagtccgagtcccgaaacgcgtcaatacacatccggtaaaattcaggccaggcgttaaacgccgttcccagtgaaatgagcataagcggacggtcatcggctgcatcaatttccagacttcccgtatttgtgcgttctccaagagacggacccacaaaacagaatcgttcatcaaaggtttcctgtttcggctgaaaggcccttggcataaagacaatattcaatttttcaggcatgaaaaactcttccattgtcatccgtttcaattgttcattttcaatctgctcctggtattcttctatcgcctgtttggccgcttccagtgtttcttcgtctcttcctaattgaaaatactcattcattgcatagctcgggcagaactttacggccgggatgccgccattatccgcaaacaattttccggcaagagctaaaaaatcaaacaggacgatgtcaggaaggtcgtctttgtacagctcttccagctgcggaagcacttcaaccgcttcttccagaaacatcacaaacgcgtcatttttgtttacccgatcttttatcgtctccgggtccgcctttatgcttgtgcggtataaaacgggaatggcgcccgttttggcaacggaagcttcaaattcctcagtcacagcgaatgtcactttatacccgcgattgacaagttcctcggctacaggcagcgtgggattgacatgaccgtgagcggccacattaataatggcgatgtgtgtttttctcatcttttttcttctccctcattttcgtttatctccgcttctaaagactccagcccgtacatgacactgtttcggatcggctcaatccggacgggctcaaggtgtgaaaaggcttttacaattcctttcagcgcgacttccgcttcaagtctggcaagcggtgcgcctaagcagaagtgtacgccgaatccgaaggaaaggtgcggattcgattggcgatgaatatcaaatacgcccgccttctcaaatttgttttcatcacggttggcagatgcaacgtagcagagaacgatctccccgcttttcaagcggcgtccgcgcagttcagtgtcgtgccggaccgtccttctgacaaacggagccggagcgcgaaaacgcagcgtttcttccaccgtttgcgcgatgagagaagggtcctgcctcaattcttcataaaggccgggcgtctctaatatgctgtaaaccgcatttgaaatgagattagtcgttgtttcatttcccgccactaaaagcaggttgcaaaacgggatcagatcttctgccgtgagcttctctccctcttcttcctcttttatcaaaatagaaataatgtcttggccgggcttttttcgtttgctttctattatttccgcaaaaaatgccgccagctctgcctcacattggtcacgttcctgctgatttttctccgccgcttcaggactcgcatctttcggcatgctgacgagaatgtccgaccattttttaaactgatccatacgttcggacggaacgcctaataattctgaaatcaccatgaccggcaaagggtaagagagatctttaacgatatcaatccgccctttgttctttgcctgtttcaggagatgatcggtaatgtctttaattctcggttcccattccttcaagacgcggggagtgaaagcgcgattgacggcagatctgatttgggtatgcttcggcgggtccatattcagcatggactttgcaatcgagcttttcacatcagtcatgaggcttgagaacgtctctttatcactgatgacttttttgacatcatcgtataaaaacacactccaaaccttcgtttcttcatcaaagtgtatagggctttcccgtctcattttttcgtaccaaggaaaagggttgtatacgtccaggccgttttttcctttcatcagggttctttggatggcttgtctcgtgctcctcagcttactcatgtttcatcactcctgattgtttcatatttgaatagttgacgtaccttgaattttatcctagcacatattttcaatttttttctattcataacctgaactattaacataacacaacaaaagtcatgaatccggaggtgaaatttctcccaagaaaacagcagaagcgcacaaaaaacccgagccttcggccaggctcgggagaaatgttcactcattcgtctgcggtttctggtgctgcttttggtcttcaggaggctgcgtatttctttccatatcgtccgtatcagcgcccatgcctttcaggaaagaaaacagcagagtgacggccttgttgatttccgggtcttttaaagcgcggacgatatcaaaatacccggtcttcctgccgctgtctttttcctcgacggcctttgtgacgcccgcattgattttaacgataaacggctcaagctgttttacatcgagcatgccgagaacgccgcttaacagcaggagatttttcagcatattggccgtttccggagtattcgccttcttcacgagaatatccatcactttgtctccttggccgaagagcccgcgcagaagcgccaaaacgccgcgctcgttcatgtgctgaagaatgtgcagagattccaaaatcgcgtctttatttcgtaaaagagccgtctcgatctcttccaagtccttttttcgtttgtcttcttctgtgacggtctgttttcggatgccgctgattgctttagccattttgctgtttccccctttttacggcgtctcccggaaatacataatctttacgcgcccatttccgctcaacccggacaccgatctgcggctgcgggtttccataacggaaattgattttcggaagcggattaacgccttcttttttcaaaatctccatcttcgctgatgtttctttataagccggtgtatcggtatccttatccgcatagctgcttgtcaaaaggttaatggcggcgtcttttgaatcgttcatcggaagatagacttgtttgccttttaccctgtctgtgatgacgcatttgactttcacatttccgtacggtgaagtcagacggacaagcgttccgtcttccagccctctttcttcggcgagttcgggcgagacctcaaggaacacactcggtgttttttcggatattccttttgatcggtaagtcagattcccttcgtgaaaatgctcgagcagccgcccgttattcacatggatatcatattcttcatcaaattctttcggctcggtccactgaacgggatatagaatcgctttgccgtctgaaaacgggaacttatccgtaaataaaagcggtgaatcggttccgtccgctgcaaccggccattgcagtgaattgtagccttcgagacgttcgtaagtgacgcctgcgtagagcggcgaaagcattgccgcttcttccataatgtctgccggatgttcatagtgccaatcagcgcccagacggttggcgatgtccgtaatgatctgccaatcaggctttgaatcgcccagcggttcaaacacttcgtaaaggcgctgcacccttcgttccgtattcgtaaacgtcccttctttttcaaggctcgggcttgccggaagcacgacatcggcgaactcggccgtacgcgaaagaaagatatcctgcacaacgaagaaatcaagcttttcaaatgcggcatgaacatggttaatattggagtcgacaagccccatttcttccccttttaaatacatggacttcagttttcctgagtggatgccttcgatcatttcatgatttgtcattccgatttctttcggaaggtctgttccccagccctgttcgtactttttgcgggctttttcatccgttactttttcatagccggggaagctgtcaggcatactgccgaaatcactggcgccctgcacgttattatggccccgaagcggatatgagcctgcgccgggcttgccgtaatttccggtcacaagaagcatgttggaaatggccgtgctcgtatcacttcctccgatatgctgggtgacacccatcgcccacagtgcgcacacgctgccggcttcatgaatcatccgggccactttgattagggtatccttatccacaccggtatgtttttccgcatattccattgtataaggttcaaggcttttcacaaattcatctaatccgttcactctctccttcagaaatgcagtatccgccaaatcgtgatcaagcagatatttcgatacggcatttagccagacaatatctgacccggcacgcggctggaaaaacacatcagagcgctcggccatttcatgttttcgcaagtcagcgacgacgagcttctgtccgtgcagcttatgagaacgtttaatgcgtgtggacaggacggggtgagactcagacgtatttgagccgataatcagaacgagctcagctttttctatatctgtaatcgaccctgaatcaccgccgtatccgaccgttctgaacaatccggctgtggcgggagactggcagtagcgtgagcagttgtcgacattatttgtgccgatgacagctcttgcaagcttctgcatcacgtatgattcttcattcgtgcatttggaagatgtgataaaggcaagtgcgtccgggccgaaatgttcttttatatcagtaaatttatcagcgatcagctggagcgcttcatcccattccgcctcccgaaatgagtctccttcccggataagcggtttggtaaggcgtttttcactattgacgaaatcccagccgaatttccctttcacacacgtcgaaatgccatttgctggcgcctcggcctgaggttctacctttaaaatgtctcttcctttcgtccatatatcaaaactgcagccgacaccgcagtatgtgcatacggttttcgtttttttgattctttcatcccgcatggccgattccatgtccgatatggccaaaatcgatccgtatccggtttcgacgccttttgtgatgtcaatcatcggccgaagcgtctcttggttaatgcctgttaaataccccgcttcgccttccatgcctttttccatcatggcattgcacggacataccgttgaacaatgtccgcaggaaacacatgatgattcattgatcggcacatcctgatcccaaatgacccgcgggcgtttccgctcccaatcaatgcttaacgtttcggttacctgtacgtcctgacaggcttcgacgcagcgtccgcacaaaatgcactggtcgggatcatatcggtaaaacggatttgattcatctttaggatacggtttttgatcgaacggaatgctttgatgattgattttcatttcctttacggtattatgtacttcgcagctcccattgttgtaatcacagaccgtgcagtacaattcatggttgtgcaaaatgttgtccatgccgataatctgcgcttttttcacatcagatgaaagcgtatcgatgacatctccgtcctttatttgcgcggaacacgaacgcaccagttccccgttaacattgacgatacaggtatcgcacgtttcaatcgggccgagactcggatgataacacacgtgcggcacgtcaattgaactattattcaaaagctgcaaaacggtttgaccgtccggcgcttccatttcaaccccattgattgtaaccttctttgtatcagccattttcttttcccctttctgtacccctctatacatcctctatgattcccaaccggcctttcactaaaacatctcgtttatctcaggaaacatacgggtatgagcggtaaaaaggaggcgttcacatatgttgaagaaaaaaacactcgccacgggattatcggcagtgatgctcacgggatgcgcattcggtgcagaggcattttcggttacacagcccgtccatgccgcagccgcttcaaaaacggaaaaccagcgtgcacaagaactggtgaacagcctttaccaatcggcgtttaaaggggaaatgccgcaacatgtgaaaggcctgaaaatcaaccaaagcacaagacaggacgtttacgataaaatcggcgagccggaacaaaaagcagacagccgcaatccatttgatttatacagctggaacatgggaaaccccggttatggattttcctatcataaaaacggaaaaatctcggaaatacgctatttcggaacaggggtcgagcggcgcttaaacctcggcggcgtcacacctgacgtcttaatcaaacaaatcggcagcgctgacaaaatcctgacagtgccaaaaacgggcgaaacagattacgtctaccatacggggcagtatgagctccgcttcgtcatcggcagtgatcaaaaagcagaccatgtcagcttaaaagcaagataacgcgaaaaaagcggcctcccgggccgtttttttcatagacagcttctccgtcgttccttacaatacatgggagtacaaaaaaaggggaacagtgtgaagtgaatagacatccattgacatacggaatatgtaccgtttttatcatcgccctcggtttgctgtccagaaccgcatacatcaccgccctattgcccggcatcataaacgcttatttaggagatgccttgtgggcggcaatgatttttacaggattcgggcttttatttcggcacatccggacggaaacagccgctatcctgagcctatcgttttgctgtctgattgaatgcagccagctgtatcacgcgccgtggattgacgcaatcagaagcagcacgctcggtgggctgatcctcggctggcaatttgtctggagtgacattttcgcctataccctcggggtatgcgctgccgcatttttagaatgggccgtaaaaagaaaccgccagtccccttcataatcggagcacgccgccgatatgaagggataaggaggtggaagctatggatatccctgcgttatcaatcgctatgcaccaggcatctctggcgcagaatgtaaatatcgctttaacaaaaacggtcatgcagcatgcacaggctgcggcggaagaaacagtgaaaatgctgccgtcccagcacccgactgccggccattcaattgatgtgaaagtgtaaaaaaagatgccggatgataaccggcgtcttttttttgcccgttgtacgtacaccataccgggcatacaggaataaggtaaacggaaccaacatttgaaaaggaggttttcctcttgtacgatcctttctatcatgaagacacagccgagagccacgaacgggtgccatatcattatccgcggccgccttattatttccccagaccatatccatactacccgcggccgccttattatttccccagaccgtatccatactatccgcggccgtatatcccgttctatccctggtattaatatttgaatagaaatgactgcagacaggaggcttcccctgtctgctattcaactttgaccgacaggatatacgggagggcttgaactttttccattaccgccgctttcccgcttttgcttttcacccttcccttcacttcaagcaccgccttattcaattcataggacgtaataagaattcctttttcctcaagagaagttaaaatatcattcatgacggctttctcctcaatcctgaaactgacagacaaagaatgcgccgccggtttaaacagaaaatttaacagttcaagcccgattaacgccaaaatcgtgccgctgatgccaatgacatacatacctgccccgatcgtcagcccgatccccgacgtagcccaaatccccgcggccgtcgtaagcccccgcacgacatgccgctgcaaaataatcgtgccggctcctaaaaatccgacgccgctgacgacctgcgccgccacccggctcggatcaaaggacgtatggctgttggataacaaatcaaaaaagccgtatttagaaacgatcatcatcaaggcgctgccgacggccactaaaaaatgcgtcctcaaaccggcttccttcgccctgaattctctctccaatccaataagagccccaagcagacccgcaaccgccagacgaatcacaaaatcaagttccatccgtctctctcctttccttatcttcttacccgctttttatcccccgtatctttttcaatcagcacaagactgcccagctgaaaaaaactgcatttgaatatatactttggttctttatcatattgtcagtgctcttatttatatgcggaaggtattaagctgacgtttctaaaataaggaaaataacttattgagagtatattaaacaagtttattcgttgaagctgcggccgcttgtctcttccaatcttctaaaaacagaacgaatgccgctccctcatgctcaaaaattgctttcaatccgcaaaaatatatcgtaatataagatataatcttaataaacgatagaaggtggatgatgatgtcaaacgaaataatccgattaaatgacctctggacagatatttactaccggctccgttatcagcaccatgaaaaaattactcaccaaggtgtacggattctgcaagtcattcaaaaagagaaggcagtcggaataaaagacattgccgaagcgattcaagtatcacataataccgcttcggaacatataaagcggttactgcagaaaaagtacgtttataaaaccagaagcgttgaggatgagcggaaagtcattttaaaacttaccagtttgggagctgatgtcctttaccggcattccggtcttgatgaagaaaagcttaaacagcttctttttgacagcatgaataatgaagaaagaacacttgtcttaaaagcattcagtttgatgaaggagcgtgctgaagatgtttacgatcgttaaaatcattgtctccgctgctattattgggattatcactgaaatatcaagaagaagcccgagttatggaggtattatagcggctttaccaattgtcagtatgctgagcatggtttggctgtacatccaaggcgaaacgaaggagacattaagtcattttgcattcagcgtggcttccggcatcccctccacagtcattatgctggtcattatcggcatctcccttcgccattcactgtctttcattgccgcatcagggcttggacttacaggatggctggttttcttgtatgctcaggattttatcgtaaaacatataaacagtcagcaataagcaccttagcgcttgtttgtaaatacgagaaataaaaaaaacagggatacccctgtcttaaaagtgactccgattaaaaagcgaaacccctttcttcacgagaagcagacaccgccgaacacaaaaacatcccgtgttgagaacggagtccgcagcctgtacagccatatcggcatgaagaaccggctgatctctcaaacagaatgtccggcaatcacctcaaaaaacgaggtgaaatctgtcagtatcccgtcagccgccagctgtttttcttcaaatagcgcgcggttttttccgagcgggtcaatggctataatcttgcctgcacctgcttttttcgccgctgtgagccccgaaaaggcatcttcaatgactacgcattcttcaggtctgaggcctaacttttccgatgcgatgagaaaaatatccggcgccggttttccggggaagctcccgtcatcaaacgtgactttgtcaaaatcaaaccaccgatccaactgaaagacgtcaaagtaaaactcgacattttcctttaccgtagccgtggcaatggtcattggcgtttctgattttttcagatggttcaataccccggtcagtcctttcgtcagctttaactcatctttgttttcaaggcataattctctgtagtaggcttctttttcaaaagacagcttctcgatttcttcatttgttaaatcgccggaaataaaatacgtcaggatttcactgtttgttctcccgtgaatgttaacgaaaatgtcttcatcagaaatggttttcggcgcgtattttttcaccatgaaaaaccatgctttttcgtgcagatgcgaatcttgaaacatcgtgccgttgaaatcaaaaataacccctttcatcgaaccgcccgccttttttatttttttgcgattttgacatctacatattgctcgtaatgaatttgaacatctttcatcactttatcatccgtaatcagatagtccatatcgtgcaagttatagaacacgtaaaaatcttcccggttgaattttttattatccgccagcaaaaatttcgtccgcgaattattcagcgcgatttgatgagcctccccttcttcaatgctgtaagaagaaatctcatcattatgtatgccgttggcgctgatgaaggctttcgtaaaattgaatttctgcagattgccgttcacgatgggcccgacgaaggcaccggtgttttttcggaaatcgccgccaatcaggatggtatccgcagtgtcaccatgttttaaaatatcaaatacgggatagttgtttgtgataatcctgattcgcttatgcagcaagtgtttggctaaaagttcaatcgtcgtgccgggccctaaaaaaacggtatcgccgtcatttacataggaagctgcgagttccgcgatcttctccttctcctccatttgaacacccagtttttcattatgcgataattcgtgatcaatggaataagatatgctctgtgcgcctccgtgaatacgtacgatttttccggccttatccagctcgtccagatctcttctcactgtcatatcagaaactgccaattcatcgataatatcactcaccgtaacaaacccccgcgagtttacgatatcgatgatttttaaaagacgctctttttttaacatgttcaatcatcccctcaactttacacacaatctaacacaccgcggcaatccggtcaacaaaaacaaacactaacaaacaacataatcaacatataaaacaacgaaaaacttataaaacccctattaaaatagattttatttctttatgaagctattgacaacaaaaatgtatgcgtttactattaaacaaaagataacaattacaaacattaacaaacttcaattcacacattggcgaaggaggattcagcaatgctcaaattacctcatgactttattttcggcggggcgactgcggcatatcaagcggaaggcgccacaaaagaaggcggcaaagggcctgtggcctgggatgaatttcttgaaaaacagggaagattcagccctgatccggcaagtgatttttaccgccagtttccggaagatattaaactatgtgaaaaattcggaataaacggcatccgcctttctatagcctggacgagaattttccctgacggcacgggcaaaatcaatcaggaaggtgttgattactatcatcgtattttctcagagtgccataaacgcaacgtcaccccttttgtcacgctgcatcatttcgatacaccgaaaggattatttgatcagggagattttctcaaccgcgctgcgatagaagcgtttgtcagctatgcggagttttgctttaaagaattcagcgaaatcagatattggagcacgtttaacgaaatttatcccacagccaccaaccagtatttactcggggttttcccgccatctgttaaaagtgatatcacaaaagtcattcaatgcctccatcacatgatggtagcgcatgcgatgaccgtcaatctttttaaagacggcggctatccgggagaaatcggtgtcgtccactcattggaaacaaaatatcccgccagtgactcagaagaagaccgccacgcctgttttctggatgacgcgttatcagtgagattcctcctcgatgccacctacctcggctattattctgaggaaaccatgcgggctctggatgaaatctgtgaggcaaacggcgcttcatacgagttttcagacagtgactttgacgtgatgaaaaaagcttcgacgcacaatgattatctcggcatcaatcattatcaatgtcatttcgtcaaagcgtacgacggagaaaccgttattcaccataacggaacgggcgataagggcacttcggtctataaagtaaaaggaatcggcgaaagaatttacaaagaaggcctgaagcggactgattgggactggctcatttatcctgaaggcatgtatgacatgctgatgcgcatcaaacgggactatccgcaatataacaaaatttacattaccgaaaacggcatgggctataaagatgagtttgaagacggcatcattatggataaggcaagaatcgactatttaaaagtctatttagaagccgtcagtaaagcgattaccgacggagtcaatgtaaaggggtacttcttatggtccttaatggatttattttcatggaccaacggctacaacaaacgttacggtcttttttacgtcgacttcgacacccaaaaacggtatccgaaagaatcggcctactggtacaaacttgtaagtgaaacaaaaacaatcatttaacgatcatacatgatgaaaagagtctcttttcatcatgtgtgccgtctttaggaggttttttcatgacaaaggaagaattgcagatgctcggttttgaaattgtcgcctatgccggtgacgccagaagcactttattgaaagtcctgaaagaagtccgtgccggaaacttcgaaaacacggaagcagcattgaaaagcgccgatgaaaatttaaccctcgcccacaatgcgcaaacgaaaatgttagctgaagaagctgacggcaaggacatggaattagggtttattttcgttcacggtcaggaccacttgatgacaacccttttgctccgtgatcttattcaggattttatagaactctaccgaagccgccgataaggagtggaaaaatgaacggtatcatcaagcaaatcgaaaagggaaaaccgttttttgaaaaaatctcaagaaacatttatttaggcgcgatccgcgacggcttcttaacggccatgcctgttattttattctccagcattttcatcctcaccgccgctgtgccggaagtgttgggtttcacttggcctaaaagtgtttctgaatggctttggaaagtttataactattcaatgggcgccctcggtctgatcgttgcggcaacaagtgcgaaatgcctgagtgaatcaatgaaccgaaaaatgcctaaaaacaaagggatcaaccccgtttcagcgatgcttgcttcagtcgtcgggtttctcattttaagcgtcactcaaatcgacggcggattctccacggaatacctcggcacaaaaggtcttttagccgcttttgtatccgcttttataacagtgaacgtttacagattctgcgtgctgaaaaatattacgattaaaatgcctaaagaagtaccgggtaccatttcacaaacatttaaagatgtttttccgttcgctttttccgttctggccatggtcatcattgatttattgatcaggaatacgctgaacgtatcttttgcagaggctctctcctctctcttatcgccgttttttaccgccgcagacggttatctggggatttgtgtcatttgggggatgatggcgctgttctggtttgtcggcgttcacgggccttctattgtggagccggccatcgcagctattatttacgcaaatgtagaggcgaaccttcagcttcataatgccggtgagcaggcgtccaacgtgctgaccgtcggactcgggaacttcgtcggcacaatgggagggaccggcgcaacccttgttgttccgtttatctttcttcttttcgcgaaatccaagcaattgaaagcagtcggaaaagcatccgcggttccggtgtctttcgcagtaaacgaacctctgctctttgctgcgccgatcattttaaatccttattttttcattccgtttgttgtaacgccgatggtgaatgtctgtctgtttaaatttttcgtggatgtcatcggaatgaacagttttatgtatgttcttccgtgggccaccccggcgcccgccggcttgattctcggaaccggcatggggctctcggcttttgtgctgacggctgtattaatcattgtcgatttcctgatatacctgccattctgcaaagcttatgacaaagtattagcggcgaaagaagcccaacacaccgagcctgaaagcgcgccgcaaacattacagcccgccatggccggtgcctcagaagacgcggcctccgtcatcagcacaaattttcaggaatcctcatccgccttggaacacggcaccaatgtgttagtgctgtgcgctggagcgggaacgagcgccatgcttgcgaacgcactgacagaaggagccgaagaatacaacgtgccgattaccgcctcagcaggcgcctacggttcccattacgacatcatgaaagacttcgatatgatcattttggctccgcaagtcggctcttattacgatgacattaaagaagatgcggaccgcctgcatgtgaaactcatcgcaacgaaaggagcggaatatatcagtctcaccagaaattcacaaaaagccattcagttcatactggagcatacctcaaaatagaatcggaggtttatcatggatgccaaacttttgaaatcaagattcgaagacattttcaagagaagtaacggggaactgtttttcgcacccggccggatcaacctgatcggggaacatacggattatataggcggccatgttctcccctgcgcgattacgatcggaacttatgccgtatgcgcaaagcgcggagatcaccagatccggttatactcagaaaactttactgacagcggcattgtctgtcttgatctttccgccacagcatacaaaaaagaagacggctgggccaattatccgaaggggatgatccattaccttcttgaagccggcggccaaatagacagcggagtggatattctttttcacggtacgattccaaacggagccggtttaagctcctccgcttctattgaaatgttaaccggctccattttaaggaggttattcagtctggatgtttccgatactgaactggcgcttatcggaaaaagagtcgaaaatgaatttatcggcgtgaattcaggcattatggatcaattcgcagtgcaaaaaggcaaaaagaacatggccattctgttaaactgcgataagcttgagcacgaaatgattccggctgcttttaacggatataaaatcgtcattatgaatacgaacaagcgccgggagctggcggtttcaaaatataatgaacgccgcagcgaatgcgacgcagctctttcagaactgcggcaatatcggaatatcgcatcacttgcggaattgacggcagaagaattcaacgaactcgaatcccttctctcctgtgaaactttgcgtaaaagagcccggcacgcggtcaacgaaaacgagcggaccctctcagccgcggaggctctcaaatcgaatgatttgaaaacgttcggcgagctgatgaatgcgtcccaccgttcgttacgcgatgattacgaagtgaccggtgacgaattagacgcgctcgctgaagcagcctggaaagaaggagcgctcggagcgcggatgacgggcgcggggttcgggggctgcgccatagccattgtggaaagtgaagaaaccgccggctttacccgggccgtttcatctcactaccgcagcaggacaggtcttgaagcttctttctacatcgcggatataagcgatggcgcggctgaatggagggaaaaataaatcatggcgattctcgttctcggcggagccggctatatcggttctcatgcggttgatcaattattaaacaaaggatttgaaacgatagctgtggatcatctgcagacaggccaccggaaagccgttcatgaaaaagcagttttttaccatggagatatccgtgacaaaccgtttcttcgctctgtgtttgcgaaggagaacgtaacaggcgttctccattttgccgctcaatcccttgtcggcgaatcaatgaaagaccctctttcatatttcaataataatgtgtacggtacgcaaattacgctggaggtcatgcaggaattcggggtgaaacacattgtgttttcttcatccgccgctgtatacggcgaacctgaaaaagtgcccatcacagaagacatgccggaaaagccggaaagcgcatacggcgaatcaaaactcatggcagaaaaaatgttgaagtggtgcgaaaccgcctgcggcataaaatatgtctcgcttcggtattttaacgttgccggcgcgaaaacggacggttccatcggagaagatcatcatccagaaacccaccttatccctatccttttacaaaccgcgctcggtcagcgcgaggaggttttgatattcggcactgactatgatacaaaagacggcacgtgcatccgcgattatgtccatgtttccgatttaatcgatgcccatattctcgctctggaatatttgcaaaacggcggagacagcggcattttcaatttaggatcaagcagcgggttttccgtatcagaaatggcggaagcggccaggcaagtgaccgaaagagacataaaagtaagagcggccgcaagaagacccggtgatccaagcaccctcatcgcttccagcgataaagcgcggaacattctgggctggaatccgaaacaaacggacatatcggaaatcattgcgtcagcatggaattggcatcggcaacatccaaacggatacaaggacaaatgaaatggaggcggcggtcattgaagtttttgaatcagtggcagggtttctgaaagaaagcactgtcttaggcgacataaatgaaacggatgtgatttatacaagaaacagacttctcgatctgctcggactgacggattatgcagaaccgaagcatatcaagaaacaaaacaggcttcactatttggacgaaatggtgaaagacgcggtaaaacggtcaatcattaacgatacgccggctgaaagagacatgctgggaagcagaatcatggacgtgatcacaccggccccttctctgatcaatgccgcattcagcaaattgttatcagattgtccgaaaaaagcaacagattatttttatagattgagtcaaaacaacgactatattaagacgcgggccattcgaaaaaatatcgtgtaccgctcaccaacaccttttggagaattggacatcaccattaatttatcaaagcccgaaaaagatcctaaagacatcgccgcgataaaaaacagcccggaaaaccgttatccgacatgcctgctctgtatggaaaacgaggggtatgccggaacaccgcatcaccctgcccgttcaaaccaccgcatcatcaggcttgacttagcgggagaacagtggggttttcaatactctccttatgcgtattacagcgagcatgccatctttctttcaagcgtgcacaagccgatgaacatcagccgtgacagcttcagaaggcttctggccattacggaaatcttcccgcattatttcgcgggatcaaacgcagacttgccgatcgtaggaggctccattctttctcacgatcattatcaaggcggcggccatgagtttccgatggcaaaagcgggttccctctacccttttcatatgcgtcattttccagacgttcaggccgaagccgtgaagtggccggtatcagtgatccgccttcgcgcaaaagatccggatttgctgacagatgccgctgcgtatgtttttgaaaagtggcgggaatattcagacgaaaccgtcagcatcatcgcaaagacaaatgaaccccataataccgtcactccaattgccagacgcaggggaacggatttcgaaatggatctcgctctcagaaacaaccgcacctccgaagattatccggatggcatttttcacccgcatcaagatgtccatcacatcaaaaaagaaaatatcggtctgattgaagtgatgggacttgccgttttacctccccgcctgaaagatgagctggcagaagtgaaaaagtatttactgaatgaacctcatgacatcaaagacattcatcttccgtgggctgaaaacatcaaagcggataaagacgtgacaccggaaaatgcagccgctgttatacaaaaagaaaccgcgaatgtatttttacgcgcgctgaccgatgcaggcgtttttaaaatgacacccgaaggaattcaggcgtttcagcgtttcacgacgttattggagaatggcagctgaaacattcagagtgaaatcaatcaacaatcttttttatcaggaggtattgtgatgttcaaaaaccgattgaaacgtgtatttgtaaacgcaatctgtctttctctcattttcactgcttttacattctttgagaagtctcctaaagcaaaagcggatgccccgtttgcctatggcgctgatataggatggctgaaacaaatggaggacgaaggtgtgcgctggctggatgacggcggaaaacagaaagatgccttgcagattcttaaagatcacggaataaatgccgtgagactgagagtgtttgtgaatccgccaagcagctattattggctgaaagacggcacaacatggaccatgctcggctatagtgacaaagcgggcgtacttgcggcggccaaaagggcaaaagcgttaggaatgaaggtaatggttgacttccattacagtgatgtgttcgctgatcccggccaccagatcaagccgaacaaatggaccggctattcaaacagccagctgcaggcagccgtgtataaccatacgtacgatgtcatgaaagaacttaaaaatcacggcatctcccctgattgggtgcaagtagggaatgaaatgaattcaggaattttactgcccgacggcagcacgaacgatttcagcaaattgaccgccttactgaacaaaggctatgacgccgtgaaatccgtcagcccggccaccaaggtcatcagccatttggcacacggcacggacaacagcctattcagatggtggtttgatcaattctttaaaaacggaggaaaaaccgacatcatcggcgtttcgttctatccctattgggaaggtaagccgtactgggagctcaccggccatttatcatctaatttgaatgacatcgcctcacgctacaacaaggaagtcatggtggttgaactgggcggagatgaaaataatccgaaagattcctactggactataaaagacaccataaaactggtgaaagccgttccgaacggcaaaggaaccggcgtattttactgggagcccgaagctcactccagcgttctgtcagacgcgtatccattaggcgcaaccgccaaagtgtctaaaaacgtcttgaaatacacaaccgcaatcgacgcttttcatgacgccgcaacaggaaaatgattgatgcgaatctcaagcaggctcactgcgcagcctgcttttttataaggctgcagtgttggcctgttatgaaacagagcaagtaacgaatacggaaagaaaaatacccgaaaaccacgtttcggttaaaaatagaatacttcttctatccccctccttcttaatttctgcgcactatctctcagttcctaaataataactttacgattgttgaaaaagaaacaaaaattttataatattgtgtaagcaccactgagcaggaggacggcccatggacaaaaaagaacagctcctcacggatttcagggacttttttaacaagatggtgtggctgaataggctgaagatggaagaaagccttaaggggcataaaccttctgaagtgcattgcatcgaattcatcgaaaaaattgaagacgccaatgtgactaaacttgcggagtccctttatatgacaagaggcgccataagtaaattaacgaagaagcttatcaataaaggccttatcgaaagctatcagaagccgcttaacaagaaagaaatctatttcaggcttactgagcaaggaaaagtcatttataaaattcacgaggaattgcacaaagagtttcaagaacgggacaaaatcgtgtttgaacaagtaaccgatgaacaatttgacacgatgctgaacttcgtggaaacatacagcaggcatttggattcagaaataaagaaacttggtgcagacatgaaatcggaataaatatgaataaaaccataggcagcccttctccatgaaaacgggctgcctttttatatccctcttattgttgacaaagaaacaaaatcactctatcattttgttgacaaggaaacaaagacagcaattttgagaggagcatactatgtcaacacataaaagaaaggaacttcgggtgccaaaagaagttctcacagccgcctgggctattgcactgggagcaatcgctccaatgcttgactctacgatggtaaacatcgccatcgacaaactgaccaaagacttcaacacgacattggataccattcagtggtccgttacaggctatgtcttagcacttgcgattgcagtacccgtatccggctggcttatgaataaatataacggtaagaaaatcttcatcggctcagtcatcgcctttggtgtcatttctgtttttgcggggatgagccgtgacgtttccagcttcatcttcttccgtttgcttcaaggattcagcgccggtattatgactccgcttatgtcaacactcttggttaaaacggcaggtccggaaaacctgggaaaagtgatggcaatcgtcagcacccctatgatcttcggcccgatcttaggacctgtcatcggaggcttcatcgtccaaggcgcttcatggcattggattttttacatcaacgtgttcatcattttgattgctgcaccgcttatgatgaaaaccattccagactttgaaccattcaacaaagatcgtaaactcgatattttcgggattatcaatttgtcattaatgagcgcggcattgatgtacggtattacgaaagcggcggatcatgcatcatttaacaatagcgacaccattttatgggcaggcatcggtcttgtttcagcagccatttatcttgtatataatctgatcaagaaaaaccaaaccgtgctgcctatgaatttgtttgcaaacaagagcttcttatcatcttcgatcgggttgttcttagcgaatgttgccatcatggggccgatgttaatacttccgctgttttttcaaaacattcgtcatttcacggcagtcggagcagcactcgctttaatccctcaaggagtcggaatgctcgtgactcgtccgctgatcggaaaattgattgataagatcggtgcgaaatacgtggttacggtcagtcttgttctttcgctgatcggatctattccgcttatttttatcaccgataacacaagtatgatttggatttccgtcgtattatttatccgcggcaccagttttggaggaattatgctcccattaatgagtgacgcttatacaggccttgacagcaaacagcttccggaagcaggtgtcggtattcatatgattgaaaacctcggttccagctttgggtcagctgtgatcgcaaccgttaccgcaactgtcatacaaggattgcagccgacgattccgaacagtttaaaaggctaccatgccggattcttagtatccgtcatcatccttgcggccattttcattccaagtctgttccttacccataaaaagactgcgatataaagaactttttaaagtaaaaaacccttgcacagcaagggttttagtgaatgaaactgatgattgttgccggcagagtcagccaacaatagacaaagccttttactcattcacattgcttttcattaaccactctacttccgttaattcttgtttttgaacgtcttttgtatgttttttcgtaaaatggactttaacagcttcttcgttttcccaaatctcccaaagcatgattttgcgttctgatggttcgagcggataagcatggaactgaatacagccgtcttctttgttcgtttcttcctcaagttttttgaattccttcattatttcattaaggtctttatcactgatgatttttaagcatgccgttatgtaatgcatcgaaattccccctcttcccatcattttacggctcttcattaccacatttatcgaaaaaaataccgatgttctcaacatataaaaaaccggccataaaaaatgaacgacaatgtttatttaagagcattaagagcgacttttgcagcctcagcgataagagcattattataatcggcatcttccgtaaaccggtttgacaggattgccaaaacaattggggctctgtcaggcggccaaacgatcgcaatgtcgtttcgcgtcccgtaacttccggctccggatttatcgccgacttcccatcctgcaggagcgcctgcacgaatcagttcatcgccggtagcgttgccccgcatccaatccgttaagatcgtgcgcttgtcagtcgtgagagtgttacccaaagcgaaagtcttaaggtcagttgccagtgcttttgcggtgcttgtgtcacgacgatccccgggaatcgccgagtttagatccgtctcgaatcgatcagcttttgttacatgatccccgatctgtttcagtgatttttcgaaacctttagggccgccaagctgctgcagcaataggttcccggcggtattatcgctgtaacggacagcggcttctgagatttctttcaggctcatgcctgtatccaggtgtttttctgtgattggagaatatgtaactaaatcgtctttgctgtagcggatgatggcattaagtttttcatttgagcttttcttcagaacagcagccgcggccagaactttataggttgatgcgtaagcaaaccgttcattcggccgataggcgattgtcttgtttgaacctgtatcaatcgcataaaccccaagcctggcatcaaattttttctcaagctgaacaaatttctgattcgttatacagcttgtcatttttgtgttttctatagacttcgcttcagcatgcgctgagccgaataaaggattgaaaccggtaaagcttaaacataaaagtccaatgcatattccaacttgtattcccgctttatttttcacattcaggcctcctcattataatgtttttgtatacatcttctaattaacattacaaacaggatgaaagtcaatatatttcctttgaatgattaaatcttgtattctgattcctccccttatttgcgcttaaatgcgccgcccttgccgcgtctgaatgtttgcatgtccacttcgtgttcatcatctatttgttatccctccgtgcaaataaaaacggacacagtcagagcacagtgatgctgtgcaatgatcagtgtccgcaggctttccgtcttggacctatatacgtttctcttgcagactataaaaatcataaggtaagttaacaaacgcattaccttaatcccgccagtcaaaaaattatatcattttatatatttcaataagattattatctggatctctgaaatgagcaactcgtgcacgccattcctgacgatcatgtggttcattgacgcatttaatcccttgcttgtgcagatagtcatacgttttatcaacatcttctaccttaaactgaagcaaaaatcttgattgcgcatctccgtctaaagattttctttcttctccaactatttcagccatattttctcgagataaaagttctattttcgtttctccattatcgaaaagtgcatattccatttccttctctaaccaacttattggaagtcctaatgaatctttgtaaaactcgacgcttttcttaaaatcattaaccaatagtctaatttgcaacaacttcatattgaacgcctcctatcattttactagccattcatttaatcatacaatagggacctgacagcattatgtcaagtttccataaaatttttccatactgcaccaaaatttcgggtgaaagccttcggagattcatgaaactgcgtttaatcaattcacattcttagtttgaattctcctcctctccaccgtggaggctccggccgtgtaagtcgcgcatccgtaaacattcggccgccgctcctctaagtaatacagctgatagaatgattgactgaatagttttcaccgtcattgcttcccctgctttttatattctgcgatttccttaggggtagcctttctgactccgtctgtgtctgtcctgtttgccacttgaacgccttccatgttttttatctcgctgactactcccaaatgctctaaatacacatgatcaccaatcttgaaacgattctgtttagcccgctcctcagtcatactcctgtattcagtcgcggctttcatttttaattcagccagacacatttgacaaagggttactgttacagaattgccgttaaaatcagtaaacgaaactgctctgacagattccttttccgggtgcatcgtgcatgttttcttcataggcgatggccgtgtaaattcaatcattccgcttcctcctccataaaagtcttttcgtccctctgacataactccggatgaacgggaagttccatgcacccgcattataaccgtcacaataaatggagatttgcctttccttcgccgtctgacggattttcatacatccttcatagctgtaagtctatattcctttatattcccaatgcttgccgcacttccctgttaggatgaagtttctaaagctgttgaccagttgccgcatgttggttccatgcgaaaagccgtttgggccgccgtatcccaattcatacgggtgaatttcagccctctaatatgtgtgtatgttttttaaaggagatgcatcacatgatgttccaacaaccgattcaacctgaagctaactcttccccaattcccgatcataaaataagtaaatttacccagaacaaattaatcattttgcactttcaaaatacttatttgtcttccccttcattcctacatgataatatcttgttaaagtatttcgaatgaaaggatatggtaatgaaagttttcgaagcaaccaccctgctggccgctgccaaacagcgcgcgggtgaatataaagaactgcgcggtcagatggtcaacctgaaaaaagcgtttcaaggcatggctgatcttggtgacaatgatttctcaggccggggcgctgacaacatcaaagcttttttcaaggaccacgccggcgtcacaaacagctggcttgatctgatcgacatgaaaatcgcatttctcacaagccttcccggtaaggtcgaagacgccggactttccaattcgcatgtggaggaatcatttctggagcatgagcttacccacgccctcagtaaatcaaaggcgattatggaagagcaaaaaaaggacatggggtccatcctcggagagatcgaagacatcatctcgctcgaattattttcaaccgaaagcacagatcagaagctttcttcagctgacaaaaaaagaagcgaaacgatacataagctcggcaagcttgatcacgatctaacgaaggaatacacagaaaccgaagcgaacgaacagttcatccaggccgattttcagcagctccaaaacgccacaggcaaaggaaaaagcgccacgccgcttcactacaacgctaaggcgtaccgtgaaagcgacatccataagaaaaaaggcgagattgcaagacattcggatgcttatttgacgattaaaaaggaagaagcgaaagagcgggaaatccaggatctgaagaaaaagctggccgctggtgtcaccgatccggatgaatatttggaaatcgccaaaaaggttggctatgagaatctcacccctgaacagcttgaatttgtttcatttctggaacagcgtaaagctttcatggataacggaaaagaagcattgcaaatcataggtgatggcgccaaaggtctgcttgttggtgtatacgatcttgccaaggataccggtgaaggagcacttcaactcggacggaatatcggttggacaattgacaacttaaacaaagatcctcaaaaagttctggatactgttctggaatacgattatctaggtgtctatcaaagtatggttgacacattgaaggatgattgggataaaaagatgattcacggggatgcatatacacggatgcactatgttacttacttgggcggaagccttctgttattgaaaggcggaaagtcctctgtctcaacaggctcgaaagatcttgctaaagctggtggcacaattaagaaaggcggaaagtctgtaaaacagttttacaaatctcctgtcaatcggtatactcctgcattagaaggaatccttcaagatgctgagaatactattaatgtgaagaatacatcactcctaaaaagagtagccgattccactaaagatagtgtactctataaatcaatcaatggtaagtcatcaaaaagcaagacagttaaaaaaggcctttccaaaaaatcaagagaagttgcgcttccaaaggtagacacatatgaacaagctagaaatgaggcgctaaatctaattggtgatttaggaatagattcaaaaccttttataggtactttgtctaaaagcgcaggctttggtaaagttactggccgaatgtctggagataataaagtcctttggagattagattatgaccccgaaaagggacctcatataaatgttgaggattatagaaatggaaaaggagataaggcaaagaaatattatataccttttaacggaaacgaagatacttataaatcccttttaaaacatttaaataaataggaagtgttaatatgaccttatacgaagaatgtctagaagctcttggagataacaaagaagtcctcactatttctgagacacgtaaatatcatgagcaacttggcgaaagtttccccttcacatcatggggaagaattaaatgggatgaagtaacttatcacagatctattgattacgctgaagatattgatgaatggttagttcagaataaaatagataataaaactgttattctcctttgggcttacggtgattatccagctgtaaaaaccagcttagacaacgccttaaacgtaattgatgatgtaactgctgtaggttcagataccttcatgttcagcgaatctggttatgttattgaatttttccatgatggagatgtaacaatagggaaagcaatatgaaaatattagcccttcttagttaagagaatcaatatgaatttagagaaaaaaatgaaagatatattaattaaaagaaaaaaacttaatcttaatgatgactatggcattcaaaaaagttgggatgaaataattgaagtgctctcagaaaacgaagaaaatacaatcagctatctagaaaattgtaataaagcagatttatattgggtcagtgaggtatttgaagatttagctgaaagtttgcaaagtaaagaacttattgattgtttaagaaaattagatgaaaaataccctggcctaaaaatgacaaatgatattgatatagcagaaagttatatagaataatatacttaccatctcttatatttgaagataacgattcttggtggtggtaagcaatgattgaaattaaagtttctgatcctgtatttagatttctcggtggacatttccaccaagatatagagtctccggaaaatgcacttgatgaatatttaaatgaagcatcacaaaaactaaaagaaagagatttaatagcactaactgagtttgtaaatagtgattattctgaagcagataagaatgaatttatagaagaagcagcggatggcatatactttccagaagatgatataacaccattagaatggcttaagcaagtcactgaacaaattaaaaaacaccttaaaacaacatagttagaaaaagagccctcttataagaagggcttcttttataatttcaatttcacttctcgctccgctttcgtttttagtccgtaaatgccgtatgtcttcaaaacaaacatggactgaatcgttcgaccgcatttttgatgacagataaattgaagtggtataaactgcagaaaaagagggtaataaaaaaaaaaccataataatggacttaatttatattcttctaatctcattttatgggatttttcccatctctctgatgaacaaaaagtcgctaaaccatatcggctgtattagatgtagagatgtacattaataaagatggctcaatagctactgcatatcctttatataaaaaaaccaagggaatgattgattttattatggaatattcatttgaatgtaaaagagaccatttaggatacttacgagtagttctccccgcagagttagaatacttttctgatttcatagaagacattgtttcggtagatgaagctgatgaatacttgaaaatgattcaagatgtattggatggttcttctgaagaatatgagattcaactaaatacaaccattgcatatataaaagaagatcaaacagtcatagaacacctttatacagaaaatgaaaacgatagaagctccatggagacagaaaaatccaaaaaacttatactcgattggagagacaagatcccccaaaggtataagagtgatgattgaaactttaggtcccttgaaattcaagggacctttttattacttaataccgcttcaagtttcactttgttttcgatccgcagttctatctggagaactcattaggaacggtctgacgaatttttggttttcagtgcataatagcaatcaatgccatttccttgcccttcttactggaataatgtaagtctctagagctgtttcaataaaaaataaaaaacccttgctacgcaagggttttggctatgattccgactgggctcgaaccagcgacctctaccctgtcaaggtagcgctctcccagctgagctacggaatcatgatatgtatgtgttgctgggtatgttgttgtctctctgacatttataattatatctcctgatttctcattcgtcaacactttttttatctaaaataaaaaaaagggcgcgtcgcaaaattgacggcgcccttttcgtttatgatctcacttgggcgggggttatttttttcaatgcctgttcgaagtcccgttctaaatcttcggcgttttcgactccgacgctcaggcgcagaaggccgtctgtgatgccgcgtttctccctctctgctttcggcatggcggcatgcgacatggctgcagggtatgagagaatggactcgacggcgccgaggctgacggcaaataccggaagcgatacgttttcgaccagctttttgacggcttctttgctttccaattcaaaggacaggacggcgcccgctccgctcgcttgacgtttatgggtatcggctcccgggtgtccggcaaggccgggatagtaaacgtttttgactgcgggatgcccgtcaaaataggcagccagccgctcagccgtccggctcgctttttccagtctgacctgcaatgtttttaagccgcgcagcacgagccagcaatcttgcacgccaaggacggcgccgaacgagttttgcagcttatacagctgattgccgagctcttcatcttttacggcggcaaggcctgacagcacatcactgtgtccgctcaggaattttgttgcgctgtgaagcacaatatcaacgccgagatcaagcggacgctgcagtgcaggtgtcatgaatgtattatccagaaaggtcagacagccgttttcttttgcaagctggacaaccgctttaatatcagtaattccaagtgtcggatttgacggtgtttccatataaatgacctttgtgttcggctggatattccgcgccacttcgttgatatccgtcatatcgacaaaggtatgttcgatcccgaaacgggacagaacctcagtcaccatgcggaatgttccgccgtacacatcctccgtgacgagaacatggtcgccttgggataagagcagaaacgccgtcgaaatcgccgccattccggagctgaaagcaaatcctctcgttccgccttcaagacctgcgatcgtttcttcaagcgctgttcttgtcggtgtgcctgagcggctgtagtcatatgtcccgaattcttcaaatgaagactgatggaatgtggaagcatgctggatcgggacgctgacggctccggtggctccgtctgttttaaatggattgtgcacgagctgggtttccagcgtccaattgtgattactcatatgatacggccccctcttttacttgctgtaatgcctgctttacatcccgcttcaaatcttctgcatgttcaatgcccactgaaaatctcagcagacggttgcagacgccgtttgcgatacggatgtcttccggaatgtccatgtgcgtctgcgtcgcgggatatgtaataaagctttccaccccgccgagactttctgcgaaacagatcgttttcagcgcctttaaaaacggattgacccattcctctttttgcagccggaaagacagcatcccgccttttccgggatataacacgtcggcaatttcttcttcctgttctaaaaattctgcaagttcacgggcgttttcttcatgacggcgcattctgagtccgagtgttttcatccctctcattaaaagccacgaatcaaacggcgggagaaccgcgccgatcgcattttggtgattaaacatgatctcgccgagctcttcatccttaacgacagccagaccggcaaggagatcattgtgccccgctaaatattttgtggcgctgtgaatgacgatgtccgctcccagttcaagcgggcgctggagcaccggggtataaaacgtattatccacaattaaaagcaggccggcttctttcgtaatccgggcgattttttcaatgtccgcctcctgcattaacgggtttgtcggtgtttcaacaaataccgctttcgtattttccgttattttggagcgtaaacagtcttcatcgctgaaatcatcgtaaataaagcttaagccgtattttctccattcgttttcaaacaaacggtacgtgcctccgtataaatcggaggatacaatcaattcatccccgcttttaaataaagccataatggtttgaatggctgccattcccgagctgaaagcaaatcctctcgcaccgttttccaacacggcgatggcgtcttcgacgagctggcgtgtcgggtttttcgtgcgcacgtaatcaaaacctgtagattctcctattcctctatggcggtaagcggtggacagataaatcggcggactgaccgttcccgttgcttcttcgcttctatttccgatttgggctaattttgtatcaacatgctgcgtcatcagtaagcaccatcctttttcaaaaataaaaaagccccctcttcataagaagaaggagcttttctcttcctcttatcttccaagcatgtgaatcgcttgctggatttagcaccttggcactttgccttcccgcggcaaagcaaaccggttgctgaggtttcaaagggccagtccctccacctctcgtgataagaatattgttttgtattttctgattgttctatattaacgcactataaaatgaatttcaataactttttatttatctgaactctcgcaagaagtgcatctgaagaaagaaatttctaataattcatggtacaataggaaaaaaccatcaagacaagaagcggcctggaggaatgcgatgtggcatcaaaaaacggaatcattcatgagaaaaaacttttctcccatgagcttgaagaggaaatgaccgttttggtctacctgcccgccaccttctcccccctgtataaatatcatacggtcatcgctcaggacggccatgattatttcagattagggagaattgggcggcaggcggaagagcttatgtcaaaaggggaaattgaccgctgcatcattatcggcgtcccttataaaaatgtgcgggagcgaagaaacacataccatccagaaggctctaagttcgcctcatataagcgatttatcgcaaatgagctcgttccttttatcgacaaagaatacccgacttatcaagtcggatacggccgcaccatgatcggggattccctcggcggaaccgtttcgctcatgacggcgattgactatccgaacatgtttggaaacgtcatcatgcagtctccgtatgttgacgggcacgtgctggatgccgtccggcagtcggaggatctcaaacagatttccgtctatcatcaaatcggagaaaaagaaaccggcgttcacacgacagacggccaggttcttgatttcaccgcgccgaacgaagagctcaaacagctgctggaaagcaaacagtctgaatacacgtatgaaaccttcgacggggatcataaatggacctactggcagccgctcatcacgccggcgctgaaaaaaatgctgtaaccattcatttaaggagggaactttcatgaaatacggtattgttttatttccatcaaaaaaattacaggatctcgcaaactcgtaccggaaacgctacgacccgagctacgcgctcattcctccgcacctgacgctaagagatccgtttgaagcgacagaacaggaaatcgagcaggtcgtatcacagctgagacagacggcgaaagagtcgcatccgctcgttctgaaaatcacaaaatacagctcgttttctcctgtgaataatgtgatatatatgaaagcggagccgacggaggaattaaaatctctgagtgagaaatgctactcaggagcattatccggcgagccggaatacagcttcgttccgcatgtcacggtcggccagaagctgtcgtcagatgaacattccgacgtactcggacagctgaaaatgcaggacatttcccacgaagaagtcatcgaccgttttcacttgctctatcagttggataacggctcatggactgtgtacgaaacatttttattaggcggaggagaataactgtttggaatccatcatcgcaaaaactgaaaaacagctgaacgacgcttttttcgtcagaaaagaggtcttcgttaaagaacagcacgttccggaagaagaagagattgatcaattcgaggacacgtcagagcatatagtcatatatgacggcggccagccggtcggagccggcagatggcgcatgaaagacgggcatggaaaattagaacgcatctgcgtgatgaaaagccatcgttcttcaggcgtcggagccatcattatgcaggcgcttgaaaaagcggcggcagccaagggcgccgacagctttatcttacatgcgcagacgcaggcagttccgttttacgaaaaacaaggataccgcgtcacatccggcgaagaatttctcgatgcgggcatcccccatctggaaatgataaagaaacacaaacgataaaatcaaaagcactcctgttgatatggcaggagtgctttttttatgaaaataatactatttcatgaattttattgaattttatggaattttaatgtatgtttagtatactaagtattacaattcatacaaaaaatacaattcatatttcggagggataaacatgacggcaccaaaaggaaagcatatattcgggactgttaaagtgggcacaaaaggacagattgtcattcctaaagaagcaagagatgttttcgatataaatccgggggattcactgcttatgcttggggatgaccagcaaggtatcgcacttgttaaacaagaactctttttcgaatttgcaaaagatattttaaacgctaagcaaatcgatgaagatagtgaggatgagtaaatgcacgcgattgagctgaagcaattaacgaaacattataaagaaaccgccgccgttgaccgtcttgagttctcaattgagaaaggggaatttttcgcattactcggtgagaacggagccggaaaaacgacattaatcagtatgctttgcggactcctttctccggatgacggtgatgcatcagtgcttggacacagtattttgactgatttggataaaataaaaccgaaattgaatatgtccccgcaggaaacagccatcgctcctcatctaaccgtacgggaaaacttagagtttatagccggagtctacggaattccgaaaaaagaagcaaaaaaaagaacagatgagatgctcgaattgtttcaattaaaagagaaagaaagagcaaaaacaaaaacattatcaggaggaatgcagcgccgcctcagcatcgcaatgggaatgatcaccaagccggatatttatttcttagatgaaccgacattagggctggacgtccgttcacgccgcgagttgtggaaaaatcttgaggcattaaagggagacatgacgattatattaacgacacactatttagaagaggctgaagccctggcagatcgtatttgcattttagaaaatgggactttaaaagcactgggcacggcggaggctctgaaaaagcaaactcattcagccacatttgaagatgcctttttagcgatttgtgacggggaggcgggtctttatgcttgatttcgccattcgcaaccgcaaagaaatttttcgtgaccccctgtctattatccttggaatcgcactgcctgttattctattgtttctgtttacggcgattgaaaaaaatgcgccgcttgatacctttaaaattcagcacttagcacccggactcattgttttcggtttcgctttccttacaatgttctctgcattgctgatcgcaaaagacaaacagaccgcccttttgacccgtttgtttgcttcccctttaaaaacagccgattatgtcatcggttatgcaatgccgatgctgccgttagccattttacaaatcgtcatttgttttatcgcagcagcggctgccggtttatccgccgagtggatgaatcttctcgcaggtatcgctgtcttgctgccgattgcgatgatgtccgttttcttcggtttatgtttaggggctgtgtttacggacaaacaaatttcaggtatcggaacgatttatattacactcgtgcaatttctgggcggggcttggatggaggtgagcctgctcggtgacacattcaaacatatcgcttatgccttaccgtttattcactcgatcgagctggctcaggaagtcatatccggagattattcttcctttcatcagcatatttggccgatagcgggatataccgttttggcgcttgcacttgctttcctcagttttatgaaaatcaggaagagataaaaaaagccggcactccgtaatgggagcgccggtcttctttattacgtttctttcagaaggtttatcgtatgcggcagcagacggtcatcccccggactgccatggcccggaacgacaatgctgatgtcctgatatcttttcatgactttgctgacggcgcgcggccactgatccggataaaagcccggagtaggcacgatttcctttgtttctaaagccttgattaagcatccgccgaataagagcttatcctcaggcagccagacgggaatattgtcttccgtatgcccttttcccggataaaacgtttcaattttcatatcgccgaactgcagctttgtcacgtttttcaaatctccgagcggccggtcatatccctgctgtcgggcgaagtcggcggtcagcttcgtgctgtgcacctttaccccgtatttgtacagggtgttcagaccgccgatacgatcgtcatgggcgtgtgtcacaatggcatcggtcatccttttgccgggaaaccgctgttttatttgtgtcattaattgctctgtgagactgtcattccacggagtatcaatcagtacgattccttttgaagtctcaagaagcaatccgttcgcagggacgggacttccgtctgccgtaccggtgcttgtatgcatccagacatgcggcgccagctgtgtgagagtgacatcttttgctgcggagccctccgccgcgtgtgccggtttcattccggcagtaaagaggccgaatagaaataaccccgcaattaataatgaaagctttctcaaattgaatcattcctttccgtatctttcatatatacgactcaaaaaaagcccggatatttccgggctttttcacacgtattgatttatcagccggccttttcccatgatttgcggcagacgggaaagagagcgcttacgtttttcctcatgtactttcttttctgcggctgcggtattttcctggcggcgctccacctctctgtacaacctgtcattggcgagggcggccgctttcgtaatgccggcgtaatcaggcttataacccgctgcccggtttgcgtattgagaatactgctggttttgaatccgtcctgcataaatcatatgtacccctccccttcgcttttcatttcccttaatcttactttttgaaacgcggttcttttgttatgatattctttgtctatcaaatggatgaacaccttttaatgggaggacccctttttgaaatgcgcccgactgaataaccgaacgatacatttacatacatattccagagaacattaccaattcctttttgaagaagctcaaaaaggaaatattttttgcgcacattgtgaccagcccgtcttgatgcggctttcgattttagagcagccggcattttatcaccggcaaaagggagacttcaccgcctgtgaaaaagcatgcgcggccgaggaaccgcaagcggagaaagaaaaagaagagtataaggaagccggcatgttccgcctgccgaaaggaaaagcgatttcagagaatccgaaaccgatcgtctcagaatggaaaagcccgaaaaaagtgcctgcggccgaaccgttttcaccaacatccgaggcggctgatacatctttgtttcccggcatcggcctgaaccgtgaacagatgaaggcagttactgaaacggacgggcctttattagtgcttgccggagcgggaagcggaaaaacgagggtgctgacagcacgcgccgcccatatgattgaacacctcggcatttcacctgagaatatgctgcttgtgacctttacgacaaaagccgtcgccgaaatgaaagagcggatggcgaatgagtacggtctggcagccggaaaagtctcccgtctcgtgaccggaacattccacagttttttctataaaatactctatcattatgattcttcaaaatggaacggcagccagcttttaaaaatggagtggcaaaaagagcaatatgtgaaaaaggcgctctatgaagaaaatttggatgaaaaagagtttcccgtcgaccaggcgcttcagcttatcggctgctggaaaaacacgtatctcccccatgagaccattccgcttgcggacgactgggagaaaaaagtgtacaggctctacgaacattacgaacggcagaagcgggaaaaacggcaatttgattttgatgacatggcacaaggctgttatgaactgtttcaaagccggcctgatattctcgcgcagtaccaaaacagattttctcatatcttgattgatgagtttcaagatatcaaccctgttcagtacaacattatgcaaatgatcgcaagtcctgagaataacctgtgctgcgtgggtgatgacgaccaatccatttatgcgttccgcggcagcagcccgtctttcattcttgattttcaaaaggattatccggcagcaaagaccatttacttaacggcaaattaccgatcgccgcatccgatcgtctcaagcgctcatgccgtcgtaaagaaaaataaaaaacggtatgaaaaaacactttctgccgtcaaagacggcgttcacaatcccgtgatgttttatccttacgatgaagaagaagaagcgaccatgattgtttcagatatgaaagagaaaattcaaaacggggcgagccctgacgattttgccgtgctttaccggacaaacagcgccggacgggccatttatgaaagactgcatcaatcatcgattccttatcatgccgaccggggcgttcagacgttctacagccgcagaatcgtacgccagatcctcgcctacttatatgcgagtcagaatgaagatgatccggatgcggtgaaagacctgctgcccgccttatttttaaagcaatccgccctgcaaacgttaaaggcgctgtcaatcacggaagattgcacgatgattaaggcactgacgaaactgcctgacctgaagccttttcaaatagggaagatcaagcagatcgttccgtttttcgcaagcatccgaacaatgaagccggttgaagccatcacctttgcagaaagcaaaatgggtttttccgagtatttaaaaaaacggggcaatgagggaaacaaactggaaaaaggctctgatgatctcagggatgtcaaagtggccgccaaaaaattcaaaaccattcccgattttcttgcgcatgtcgatcatatgcgcgccgctgagaatctgaaaaccgatgaaaacggcgtcgaactgctgaccattcatcgctctaaaggtcttgaattcaatacggtctatattttaggcgcggctgacggctcgatcccccatgacttcgcgcttgagacggcgagacagggcgatcccgctccgctcgaagaagaaagacggcttctgtatgtcgcaatgacaagggccatgcagcatttatatgtatcttgtcccgcgtacaggcggggaaaaacagcgcgcagctcaagatttctcgagccccttcttcggacggacagacggagcgcactcaggatataaagaacccggcagatcactgccgggttcttctcacataaaaaggcctttttagcaaggccgtctgacgcctatttattgttcagcattttagaaatggtgccaaaatcaagtttctctttaccgcttgtaatagattgaacgattttgtcttccaattctttcggaacacgcttgttagccagctgggacaccttctgaatgacgcccctcaccgtgttttcatctttgaaattggcattttgcaatgatcctgcaaggttcatgacatccttcatgctgacgcctgttttcttctcaatatttttgaaaaattgattatccatggtgtgcctccttttgtggagtaatacgatattgtatgaataaagagcggaacatgtgcccgtaagacaaggaaaaaattccgagtgccccgtctctatacgccttcatacatcagggaagcacgggactgaacggtcccgcgcttatccaaggtcttgctaaggtttagccaaaaaaggatgcaccgacaatgatcagaaggatgaacaatacgacaacaagaacaaatgttgagccgtatccgcctccgacatagccgcctccgtatccgccgcagccgccataaccgccgtagccgccgccgaatccgccatatccgaatcccatatctaagcacctcctttactctctatacactatgtgagccgacttgtttggcttggataaatgcatagggccggtgcggatttcattcattttagtgagaatgctcatttttcttcagttttgcttctgtttcggcggcaaacacatctatccattcctcaaagcgcgatcccgcttcatcaaactcagacagctgtttttcaatagataagatatatttgtcatgctcccgctggttttgattgtgccggcggtatttaccgtttatgaatgattcaaatatattcataacatcccctcctcctatgatctatgccgaacagaggccggcgttcggcaaaaaacaaaaaaaccggaagctccggttttttagagaacggctatttcggttttttcttttggccgcagccgcagccttttttcttaatttttttttcgtaaggctgatgcacagttgttttgtatggagaatgttgggaaggtttgcttgattgattcatggtgatccttcctttccttatgtcatatatgccagtttatgccgaaagtgacggtaagttgctggtggaaccgccttattcctgcagaagacgagaaaccgcagcttcaatgatcccggccgcgccggctatggctaacagcaaaatcagccattgcgcagcctcgggtaccaaaatctgcgccgcaattaaaaaggccgcgcaccacacgcccgtacaccagtagcagctgagaagttcaccgataaatgccctgataccttttccttttatgacaatgtaggtttctgtcgtgccgtctggtgcggtttctgttttttcctcgtgaaaaaggctccgaagcggcgccataatggtgtcaaatacgaaaagcctggccagccggaaaacggcaaacgataacagaataaatgaaagccaattgataaccacctgttcactccttttcaaaacttgacctctttatacatatgcgaaaaccctgatcttcatgaatcgcaccttgtccggtaaaaaaataggtgcgatttagttgtttttcttattccgctcggcgtttcatttgcattatataaagtatgaatgagaaaggagtgaaggttatgtcgtttgaagaaaaagtcgaaacactgcaacctcaaatattcgaacaattatccaacgaattcgagcagaagatcgaagtgattgattgcgaaaatgtcacaatagatacaacacttataacggccgctctttcaatacaagcttcagttactacggcgattatccttgcgacacagctcgcgatcgcagatgaagacacagccgaccaaatggcaaccgaactgctgatcctcgatgattgccaaataaaaaagcgaaccctcattcaagtcattaacagccgcaatgtcaaaatcacactgactgcagacgatatcatggcctttgtacaaactttgtttcaattattaaatatactttttgctgaactagacatcctttaacctttcttttcaaatatttaaacagaggtgagaacaaatggcagataacgaaaaattaaaaaaagaactcgaaagtctaccagaagtggatccgcttttaaaagtgcttgtcagcaatgtcttcaaaaaacacggcgtgacaaaggataaaatgcgggatatccctgatgaagaaaaagaaatgctgatcgcattagtcaaagacatgcaggcgaaatcagaagcttttcttgaaagccagagacagaaaaaagagcaggaaaaagcgcaagaacagcagacaaatccaaaaacccgcagagaacaattaatcgaacagctccggcaaagacgccaaaatcccggtcaataactaaaaaatagtgatttttatcaggatagatgcctgagtcaaagtaaggggccggctcatttaatattagtaaaagaaaaggaggaatagatatggaaagcagaccatactcttgggttgcacttgatcctgaatgcgaacatccgcgagaagaaaaagaagaaaaagaaggcagaagatgcagtgtttgctgtaacggaaacggattcggcgaagataatgccttcatcgaccaggacctggctcaagcgaatctcaacaaacaagtttctgaagaagcgattattatcagagactcttgtgatattaacgtaacgtcaacagacgttcaagcagtcgcttcagtcatgacagctcttaatgcagcagtcgtaacggccactctcacttcaatcgctgacggagtcattgctgaattggtcgcacaagacttattgcagctaacagctaacaaacaaatcaaccgtcaaaaactgctcatcgaaaactcccgcggcgtaaacgtgacaacagtagatgccgatatcgcagtgttgatctcaacagcgacaaatacactggttgccatcttagtcatcaccctgatcctctaaaaagaaaaagcagagctaa

SEQ ID NO: 22 - DNA, 208844 bp, Bacillus amyloliquefaciens
tagttttcaaagaacttttttcacttctctcgaagcgacctcttaatcataacattttcagtttgctaggtcaatacttttttaaaaaatattttcgctaggcttgccttctattaaaaagacaacaaaaatgattatatcagcatcatcactatgtgtcaaagctttttttcaattctttatatagtaaaagcgcagcctattacagctgcgctttttcgtttatacttcttccgtttcttccggctcttcttcattcttttccacaagcgccacagtggctacatgctcttgatcagacatgcggatcagacggacgccttgtgttacgcgtcccgtagtggaaatatcattaatatccattctgattaacacgccgcttgccgtaataatcattaagtcctcttcgccttttgttgctttcacggttactaacggaccattgctgtcagtgattttacatgttttaaggccttttccgccccggctttgaactctgtattctgaagccggtgtgcgtttgccgtagccgttttctgtcactatgaggacgtgggagtcttcttcaagaatctccatgcctacaacgacatcatcatctgtcagcgtgatgcctttaacacccgcagctgtgcgtcccatttgtcttacatcttcttcagggaaacggatcagcaaaccgttcttcgttccgatgatgatttgtttcttgccgtcagtcaggcggacggccatcagttcatcgtcttcccggagacctagggcgatcagcccgttattccgtatattcgcaaactgggacagtgccgtacgtttcgacaccccttgtttggtcgtaaagaagaggtattgctcttcatcaaacgtgctgaccggaataatggcattaatccattcgcctttttcaacttccagaaggttaataatcggaatgccttttgccgtacggccgtattcagggatttcataacctttagaacggtagaccttccctttattagagaagaacaggatcgtatcgtgcgttgatgtggaaattaagtgttccacaaagtcatcttcattcgttcccattccctgtacgccttttccgccccgtttttggctgcggtatgtggacgccgggagacgtttaacatagccgttatgggtcagtgtgatgacgatgttttctctctcgataagatcttcatcttcaattgtttcaagaccggacgtcacgatttcagtgcgtctctcatcattgaaacgctctttgatttcattaagttcttcacggatgatctcaagaactctttcttcattggctaaaatatctttcagctcggcgataagcgcaacaagtgattgatattcctcttcaatcttttcgcgctccagaccggttaatcgctgaaggcgcatatccagaatggcttgcgcttgtttttcagtcagtgagaattgttcgatcaaacctgttctcgcaatttcagccgtctgggaactgcggataagagaaataacagcatctaaatgatcgagagcaattcttaaaccttccagaatgtgagctctcgcttccgctttgcgaagttcgtaagccgttctgcgccggatcacaatcttttggtgatcaagataatgctccagacattgtttcaggcttagtaccttcggctgtccgtcaacgagcgccagcaggttgattccgaaagacgtctgcagggccgtttgtttgtacaggttattcaaaatgacgtgagcattggcgtcacggcggatctcaatgacgattctcattccgttacggtcggattcgtcacgcagatcggtaattccttcgatttttttgtcccggacaagatctgcgattttttcaattaatctcgctttgttcacctgataaggaagttctgtgacaataattctttcttttcccgatgatgtctcttcgatttcagccttagcccggatcgtaatggatccccgtccggattcatatgccttgcggatgccgctccggcccaaaatctgacctgcagtcggaaaatccgggcccgggatgtattccatcagctcctggtttgtaatctcaggattctcacttacggcaagcacgccttcaatgacttccccaagctgatgcggaggaatatttgtcgccattccgaccgcaataccggcagctccgtttacgagcagattcggaaatctcgaaggcatgacgacaggttctctttctgcgccgtcatagttatcttgataatcaatcgtatctttcgtaatgtcccggaggatttccattgcgatttttgacattctcgcttctgtgtaacgcatcgcggccgctgagtcgccgtcaaccgaaccgaagttgccgtgtccgtcaacaagcatgtagcggtagttaaaatcctgcgccattctgaccattgattcgtaaaccgctgagtcaccgtgcgggtggtacttaccgataacttcaccgacgatacgggcagattttttatatggtttgtcactggtcatgcctaaatcattcattgcgtacaaaatccgcctgtgaaccggcttcagaccgtcacgcacatccggaagcgcccgggatacgataacgctcattgcatagtccaggaaggatgtccgcatttcctgactgatattgacttcacgtacttgtggtgtgttttgttcactcattaaaaaaacctccctgaagtatcacatgaaataatgtgggagtagattgtccattatgatcttcaatacgatttcactattctccattatatcaataaacttgtgtttatacacattaatttagtagaatatacgggttttgcgggttttcagaggctttagaagccgctttgagaaaaaagccttatttcttaacgaaaataaggctttcttggttaaatatcaagatttttcacgtatctggcgtttgcttctatgaagtttctccgcggttctactttgtcacccatcagcatttcaaaagtctcgtcagcgtccattgcatcttcaagattgacttgcagaagcgttctggtcgcagggtccattgtcgtttcccaaagctgagtcgcgttcatttctccaagacctttataacgctggaggccgggcttaggtgattgcggaagttcttttaacagctcatcaagctgcttatcattataagcgtattccacccgttttccctgctgcactttataaagcggcggctgggcaatgtagacatagccgttttcgatgatttcccgcatgtatctgtagaagaacgttaataaaagcgttctgatgtgggcgccgtcaacatcggcatccgtcatgatgaccactttatgataacgcgctttttcaagattaaaatcttctccgattcctgttccgagggccgtgatcattgatctgacctcattgtttgagagaatcttatcaagtctggctttctcaacgttcagaatcttaccgcgcagcggcagaatggcttggaaatgacggtcccgtccctgtttcgctgatccgcccgcagagtcaccctctacgatatacagctcggaaatgctcggatctttagaagaacagtccgccagtttgcccggcagattggaaatctcaagcgcacttttgcggcgggtcaattcccgcgcttttttcgctgccatccgcgctcttgcggccattaaacctttttcaacgattttgcgggctgagtccggattttcaagaaggaatgtttccagcgcagaagaaaacagcgtatcagtgatcgttctcgcttcggagttgccgagcttcgttttcgtctgcccttcgaattgcggatcagggtgcttaattgaaataatggcagtcagcccttccctcacatcatccccgcttaaattcggatcattttctttgaaaatcccttttcttcttgcatagtcgtttataacacgggtcagaccggttttaaatccggcttcgtgcgtgccgccttcgtatgtgttgatattatttgtgaaagaataaatattgcttgtatagctgtcgttgtattgcaatgcaacttcaaccgttatgccgtctttctcgccttcgatataaatcggctcttcatgaacgacttctttggaacggtttaagtactcaacatagcttttgattccgccttcgtagtggtactcgtttttccgttcttgtccttcacgtttgtcttcaatcgtgatgtttacaccttttgtcaggaaggccaattcccggacacggtttgaaagcaggtcatagtcgtattcggttgtttctttgaaaatttccggatccggaacgaagtgcgtaatcgttccggtcttatcagtatcaccgatcacttcaagatcggccacaggtacaccgcgctcgtacgcctgatagtggatttttccgtcacgatgaaccgtaacgtcaagagtggtcgacaaggcgtttacgacagacgcccctacaccgtgaagaccgccggatactttatatccgcttccgtcaaatttaccgccggcgtggagaacggtcatgatgacttcaaccgcagggcggcccatcttctcctggataccgaccggaattccgcgcccgttgtccttaacggtaatgctgttatctttttcaatctcgatgttaatatctgtacaataaccggccagggcttcgtcaatactgttgtcgacgatttcccacaccaagtggtgaaggcctttgctgttagttgatccgatgtacatccccggtctctttcgaacagcttccaaaccttctaatacctgtatctgattctcatcataactattttgctgctgttccatagccatgcacattcacctacacttttcttaaacgatatattcattgtaaagatccgctaagaatctatttctaacataaattgcgcacgtttcttcagtgtgccggaagataagggagagtaatatatattctcagtcgtgactacgatagactttggcgtgccgtttacggacggcactactttttctttctgtctgtccagaaattcttcaacgatcggcgatacattgaccttgcagtcaaaaatgccgacgatatcgcgtgttgaaacgacaaagtcgtcacctaaatgaatatacaatcgctcacctcatttcttcacttcactaacgtaccgttttccacacggaacattcctgcttgatgtaaggtatcgtggtcaatgccatccacgcttgtcgtggtgacaaatgtctgcacacggccttggatcgtatgaagcaaatgggactgtcggtaatcatccagctcgcttagtacatcatccaaaagtaaaatggggtattctccgatttcttcatgaatcaaatctatttcggccagcttcaaagacaaagccgtcgtacgctgctgtccctgtgaaccgtacgtctgcacatcgcgtccgttcacataaaaaaggacatcatcccgatgcggtccgaataatgtgacgcctcgttctatttctttttcttttaatttcgaaaaagactcctggtagctgttacctattttcgacaaatctttgggatctgatacatcaagcgccgtgtgatacttaagcgtcagttcttcaagtccccgggaaatgccggaatggatcggctgcgcccatttttcaagctgtgccgtaaactgcagacgtttggcgacaacttttgcggctgcttcaatcagctgatcagtgagaacgtcaagcatagtccggtcagtctgtttccggctttgcagctgtttcagaaaatgattccgctgtgaaaggattttttgataaagagataaatcatacagataaacggcagaaacctgcccgatctccatatcgagaaatctcctcctcacctgagggcttcctttgacgagatttaaatcctcaggggcaaacataatggtgttcagcgctccgacatactgactgagtttttgctgctctatatgattgaccttgccctttttaccttttttggagatgacaagctgcatcgggatgtccccgttacgcttcatcactcttccttctattttagcatagtcttcgtcccaccgtataagttctttgtcatttgaggtgcggtgtgactttgccatcgaaaggacatagatggcttccatcaaattggttttgccttgggcattttctccgatgatcacattcaccttgttttcgaattgaagctcagcgcgctcataattacggtaggatgttaattctaaattttggatatacaaccgctgtcacccgctttaattgacgacttgaaatgaaccaaatccttcaatcgcgaccacgtctccaacgtaaagctttctgccgcggcgattgtcaggttcattgttgacagtcacctcatgctcgctcagaaaccacttcgccatgccgccggactgaatcacatcggctaattttaaaaactggccaagcgtaatcatttctgtatcaatcgaaatcggatttgccatattatcgacctctttcaaatatcactaatatctaattgtactaaaaaatcctgaaataaggaaagggaaaactcgagggagcggctgatgaatagaaaagctgccgaacaaagccggcagcacattctgtttgattaatacgttctgaccggaaggatgagctgaacgatggtttcatcattcggcgtacggataagaaacggtctcatcgctcccgtaaagctgatacggatgtccgctccttcaagtactttcagtgcgtccatcatatattttggactgaatgaaatatttaattcctcgccgtcaatctggtcagccagcacagcttcgaccactttcccgatttccggagaatttgatgaaatctccagcgaatccgccggtttggcagaaagctttacaacgttgttgcggccttctctcgccaataaagaagcacggtctatcgcctgtaaaaattccttcgtgttcacgacgatttccgttttgctttcctgcggaattaagctggtcgtgtccggatagtttccgtcaagcaatcttgagaagaacaatacgtttttcgctttgaacagaacttgggtttctgtaatgacgatatcaaccagttcttggttgtcatcaagaattttgctcagctcggttaagcttttcccgggaatgaccacgttataagagctgtcttccggaatatcaagcttcgcctttcttaaagcgagtcggtggctatccgtggcagtgcataataattcaccgttttcgactttccagtttacacctgtcaagatagggcgtgtttctgaggcggacacagcgaacacggtttggcggatcaggtttttcaaaagatccgtcggaatctgaatggcgtgatgctcttcgatttgcggtagatgcggatattcatctgcatcaaggccgtttaaattaaattcggcttttccggaacggataatcgttaaatattgattttgaacttcgatttcaacagtcgccatcggcagttttttaacgatttcactgaagaaacgcgcttgcagcacgatacttcccggctgatcgatcgtcacgatttctttatcatcatcttctttcggaatgaatgactcgattgaaatatcagagtcacttcctgtgaaagatacaccttcatctgaggcgacgatcttaataccagtgagaatgggaattgtggttctggatgaaacggcttttagaacgtcttgtacactttcgactaaacgatctttttgaatcgtaaatttcatgtttatcctcctaacggataatataattaatatattttaaaaatagcagtagtaatagtagggcctgtggatttgtggataagttgtgaaaaagacaggaaacacagcctatccacatgtggacagactgtgtatggctatgaaaaagttattcacactttccccgattcatccgaggacactattatttaagcagttcttttatttctttcacctgctgctgaagctgctcgtcatcaatcagcagttttgaaatcttttcatgggcgtgaatgacggttgtatggtctctgccgccaaattcttccccgattttaggcaaagaagaatccgtcatttctcttgaaagatacatcgcaatctgtcttgggaacgccacggatttcgtgcgctttttcgctttgaaatcttctagcttaatgttgaactgctgtccgacaatccgctgaatctcttttatcgtaatgaccttcggcttagaagacggaataatatctttcaatgcttctgcagccaggtctgcgttaatgtctttattgattaaggatgaataggcgacaacccgtattaatgccccttccagttcgcggatgttgctgtcaatctgattcgcgatgtaaagcatgacctcgttcggaatatcaaggccttccgccttcgctttttttctcaggatggcaatccgcgtttccagatccggcggtgtgatatcggtaatcaatccccattcgaaccgcgaacgcaggcggtcttcaagggtcgggatctctttcggcggtctgtcgctggaaatcacgatttgtttgctttcttcatgaagcgtgttgaatgtatggaaaaactcttcctgtgtttgttcttttccggctaaaaattgaatatcatctatcaaaagtacatcaacgttccggtagcggttgcggaaatcaacggctttattatcgcggattgagttgatgaattcatttgtgaatttttcagaagacaggtacaccactttggctgaaggattatgatcaatgacataatggccgatcgcgtgcattaagtgggtttttcctaagccgactcccccgtatataaataaagggttgtacgctttagcgggtgcttccgccacagccagtgatgctgcatgggcgaatcggtttcccgatccgatgacgaatgtgtcgaatgtatatttcgggttgagcatgctttggggaaaatcagacggttcctcttttgccgcttttttcacttgcggtttcggtaaaaagttttcttcgtcctgattttgaggaatgacaaatttgacgctcaattcttccccggttaattcgtatatggtatctgcaatgagatgtaagtacctggactccagccagtctctggcaaattcattgggagcggtgatggttaaggtatccccttgcagcgaatgggctttcgtcgacttcatccaagtttcgaaactcggtttgcttagctttttctcaatttgagctagagcttgattccaaagatctaatatattctccattatccggcacagccctccttttctttaaaaatcagcgccctttccctgttatagaacacaaaaaaagagcatatggctctgaccattcgtacacacgaaatgttgaaaacatatagtatagtagaaaaacagcttttcgacaaattccacaagttgtggacaacaatctacacaagctgtgtgaaaacaatccacaacttatccacagtttgtggataaagagaatgggctggataagtaattaagagttaaaacacaaatataatatcaaattaagcgaggacttgcaatggttctcgtaatcttatccacaaacctgacaacttgttgaaaaatctttgtccacaggagttagcaatgtgaaaatgttgtcgataacgactgtggatattaaaaaaaggcaaaaaaattatccacatgtcgttttttcgggggagcgcggctttttttgcgttaaaaaaaggaatatgaaaaataaggtttctaaactggttaaggtatgttatcctattatggttgtaagaaataaaagcactgctgaagttgacaatgaataggcagcacaaatataataagtaagactgtctttaacagctattcctcgagggaggtgtcataaatgaaaagaacattccaaccgaataaccgtaaacgcagtaaagttcatggcttcagaagccgtatgagttcaaaaaacggtcgtctagtattagcacgccgtcgccgcaaaggcagaaaagtattatcagcttaggccactgaataatgtcagtggtcttttttcacattaagagaaaagtgatgtcatgcgtcgcccggtactggagaaatttcttcagtattccggcggcccgttttttttagatagaaataaaagtttctgcgagtgaatatcggagtgaattaaagtgaagaagcgaaatcggttaaagaaaaatgaagattttcaaaaagtgtttaaacgcggaacgtctatggcaaaccgccagttcgtgctgtatacgcttgatcagccgaaacaggaagagctccgggtagggctttctgtcagtaaaaaaatcggcaatgccgtcgtgcgcaatcgggtgaagcggttaatcagacaggctgttcaggaggaaaaagagctgctcaagccgaaagattttattattatcgcaagaaaacccgccggcgacctcagttttgaagaaacgaaaaagagtctgcagcacttattcagaaaaacctcattatataagaaatcttcgtcaaaatagctcatattttgttttcttcacgtttttaaaagcgcttccttttatttggcgaaaaatgaacgccatttgaaactgaaagatgctaaaatacatacaaggttcataaagattggtataggaggaaacgttcttgaaaaggagaatatggttactactgagtatggtcggtatgctcgtgctgctggccgggtgctcgagtgtgaaagagccgattacggcgaatagtccgcatttctgggacaaatatgttgtgtatccattgtcagaagtcattacgtacgtagcgaaactgacgggcgataactatggtttatcgatcatcatcgttacgattttaattcgtctgctgattctgccgctgatgatcaagcagcttcgaagctcaaaagcaatgcaggcgctgcagcctgaaatgcagaagctcagagaaaaatacagctctaaagatcaaaaaacgcagcagaagcttcagcaggaaacgatggccctgttttcaaagcacggggtgaacccgctggcgggatgtttcccgatcctgattcaaatgccgattttgatcggattctaccacgccattatgcgtacgcaagccatttcacagcacagctttttatggtttgacctaggagagaaggatccttactatattcttcctatcgttgccggtgtggccacttttgtccagcagaagctgatgatggccggaaatccgactcagaatcctcaaatggcaatgatggtatggattatgccgattatgatcatcgtatttgcgatcaacttcccgagcgcgctttctctgtattgggtagtcggaaacctgtttatgattgctcagacattccttattaaaggacctgacattaaacacgatccggaaacgcagaaagcgggaggaaagaaaaagtgaagaaggtgactgctgcgggacggaatgtcgaagaagcagttcaatcaggccttcaggaacttcaactgacgaaagatcaaatagaaataacggtggtgcaagaagaatacaaagggtttttgggtattttcgggaaaaagaatgcgatcgtagaactggaagagaaaagaaatcctgttcaggaagcgaaagcgtatttggaagaaatcatccattccattgccggaccttctgagattgttacggaagaaaacaagaaaacagtctgttttcacattaaaggtgaaaaagcggcgctgcttattggcaaaagaggacaaacactcaatgccctggaaacattgacgcagcttgttttgaaccgcggctccggccagtatcgccaagccgttgtcgacgctgagaattatcggcggaaaagaagagaaattctggatcagctggcaaacaggctggccaagcaagtgtcgaaaacgaaaaaagatatgcatttagaaccgatgccgtcaggtgaaagaaaaatcatccatgacgcgctgtcaaagcatccaaatatcaaaactttttctaccggtgaaggccggtaccgccatctcgttatttcccataaagatagcagaaaaccgaagtccgggtaaaatcggaacttcggtttttttattggtaaaaatggctctattcctaagcagaatcgcattttttgcgtttaagttttttctttttcggtctatgctgttgataaaaaaggttttaggaaataaaattaattgttattcacatgtggataagttaaagtaataagggatgaatttctgcctttgtggataacgtatcttccacttcaaaccaaactatgttatcttttaattttggcgtaaataaaattttttatatagatggaaacagagataaagagaggtgaacagcatggatacaattgcagcgatttcaactccgatgggtgaaggcgcgatcgcgatcgttcggctgagcggcccggaagccgtagagatcgccgacaaaatgtacaagggtccgaaaggcaaaacgctcagttcggcagaatcgcataccattcattacgggcatatcgcggacagcacgacgggacggattattgaggaagtcatggtgtctgttttaagagcgcccagaacattcacaagggaagatgtcattgaaatcaattgtcacggaggtattgtgacggttaatcaggtgctccagcttgctttaagagaaggtgcgagactggcagaacccggtgagtttacgaagcgcgcatttttaaacggacggattgacctatcacaggcggaagcggtgatggatctgatcagggccaaaacggaccgtgccatgaatgtcgccatgaaccagatggaaggacggctttccgcacttgtccgccgtctgcgtgatgagttgttagaaacacttgcccatgttgaggttaatatagattatccggaatatgatgacgtcgaagaaatgacgcatcagcttttagtggagaaggcaagcggcgtgaagaaagaaatcgaggcgctgctccgtacgtctgagcaggggaaaattttgcgtgagggactgtctaccgtgatcatcggccgtccgaacgtcggaaaatcctctctgcttaacagccttgtccatgaaacgaaggcgatcgtaaccgatattccgggaacgacgcgtgatgtgattgaggaatatgtcaacgtgcgaggcgtgccgcttcggcttgtcgataccgcgggaatccgtgagacagaagacatcgtcgaaagaatcggtgtggaacggtcacggcaggttctgaaggaagcggatctcattttgcttgtgcttaaccacagcgaagagctttctgaagaagatgtgaaattgtttgaagcggttgagggaatggacgtcattgtcattatgaataagacggaccttgaggctaagattgacgctgaacgcgtcaaggaactggcgaaaggccggcctgtcgtcacgacctcattgctgaaagaagaaggcattcaagatttagaggaagcgattcagtcgctattttatacaggagcgatcgaaagcggagatctcacctatgtcagcaacacccgtcatatctcgattctgcatcaggcaaagcaagcgattgatgatgcgctgaacggaattgaacaggatgttccgattgatatggtccaaattgatttgacaaggtgctgggagctgctgggcgaaatcatcggtgatgccgtccacgaaagcttaattgatcagctcttttcacaattttgtttaggtaaataaaagggaggaaaaaaccatggggtatgaagcaggccaatacgacgtgattgtcatcggcgccgggcatgccggtgttgaggctgccctcgcatccgcgcgccagggagccaaaacgcttgttttgacgattaatcttgatatggttgcgtttatgccatgtaatccgtctgtcggcggccccgcgaaagggattgtcgtccgcgaaattgacgcgctcggcggagaaatggctagaaatatagataaaactcatattcaaatgagaatgctgaatacaggaaaaggtccggccgtacgggcgctgcgtgcgcaggcggataaattccaatatcagcacgaaatgaagcatacgctggaaaaaacaccgaatttgacacttcttcaagggattgccgagcgtttaatcattgaagacggagagtgccgcggtgtcattacgcaaaccggtgctgaatacaaggcaaaaacggtcgtgctgacaaccggaacgtatttaagagggcggatcattctcggtgatttgtcttactcaagcggcccgaataaccagcagccgtctattaaactttctgagcacttagaggagcttggttttgatctcgtccgttttaaaacgggcacgcctcctcgtgtgtcaagcgattccattgattacagcaaaacagaaatccagccgggggacccggttccgcgcgctttctcatatgaaacggttgaatacattaccgatcagctgccttgctggctgacttacacgagtcctgagactcatgagatcatcgacagcaacctgcatcgttcgccaatgtattccggtatgattaaaggaacgggaccgagatactgcccttcgattgaagataaagtcgttcggtttaatgataaaccgcgtcatcagattttcctcgagccggaaggcagaaatacgcaggaagtatacgttcaaggtttatccacgagtcttcctgaggacgtgcagcagcggatgctggcgaccattccgggactggaaaaggtgcagatgatgagagccggatacgcgattgagtatgacgcgattgtaccgacgcagctctggcctacactggagacgaaaaaaatccctaacctgtacacagccggtcaaattaacggtacatcaggttatgaggaagcggccgggcaaggaattatggcagggatcaacgcaggccgcaaagcgcttggaaaagaagaagtgatcctcagccgttccgatgcttatatcggtgtattgattgatgatttggtaacgaaaggaaccaatgaaccgtaccgtctgctgacttcacgggcggaatacagactgctgctccgtcacgacaacgcggatcttcgtctgacggaaatcggccacgatatcggcttaatttctgatgagcgctatgaagcatttgagaagaaaaaagcggcgatcgaggcggagaaaaaacgtctctggtctgttattatcaagccgtctcctgagaatcaggaatatatccgttcactcggtggaagtgagctgaaagacggagtgcgcggcacagatttaatgaaacgtccggaaatgaactatgaaacagtgacaaaacttgcgcctgcagattctccggttccgcaagatgtggcggaacaagtggaaattcaggtgaaatatgaaggatatatcgaaaaatccttgcagcaagtggaaaagctgaagaaaatggaaaacaaaaaaatccctgatcggattgattatgacgccattaaaggaattgctactgaagcccgtcaaaagctgaaagaagtgcgtcctttatcagttgctcaagcgtcccgtatttccggcgtcaatccggcagacatttcaatcctgctggtatacctggagcagggccgtattgccaaggtagctgaatagaaaggatgacggcatgaatatagaggaatttacatccagtttagcggagaaagggatttccctttctgaccgccagctggagcaattcgagttgtattaccggatgctcgtggaatggaacgaaaaaatgaatctgacatccatcactgagaaaaaggaagtttatctcaagcatttttatgattcgataacggcggcattttatattgattttgaaaaggtcaccactctttgtgatgttggcgccggcgccggttttccaagcctgcccatcaaaatctgcttcccgcatctgcatgtcaccatcgtcgattcactgaataagcggattacgtttttggaaactctctctgatgctttacaattagagcatacgacatttgtccatgacagagcggagacattcggacagcggaaagacgtccgggaaagcttcgatctcgtgacggcccgtgcggtggcgcgtctgtcggtcctgagtgagctttgtctgccgctggccaagaaaaacggcgtatttgcggcactaaaagcagcagcagctgatgaagagctgaaagcggggcaaaaggcgattaaagtattgggaggagagcttgaacaagttcattcctttacacttcctgttgaagaaagtgaacggaacattatgatcattcgcaagacgaaaagcactccgaaaaaatatccgagaaaaccgggtactccaaataaatcgccaattgaagggtaatttagacagcctgatgtgacaattccatcatattttctgcaaaattgatgaagatacagcaggaaaaaccatgagaaaatagaattataaaaatggcagtttttaaaggtggtgtaggtacatgaagcattcattctctcgtttcttcgggtttggtgagaaggaagaggaaccggagatagctgagcatgatacaaacaaagaagagatactcgaaataccggtacatgctatcgttcccaaccgttttcagccacgcaccattttctcagatgaaaaaatcaaagagttagcaatgactatccatacacacggcatcattcagccgattgttgtcagacatacagaagatgaaggacaatatgagctcattgcgggtgaaaggcgctggagagcggtacagacgcttgaatgggagaagattcccgcaattattaaagatttttctgatacggaaacagcatctgtcgctttgattgaaaacctgcaaagggaagaattgtcctccattgaggaagctcatgcgtacgcaaggctgttagaacttcatgatttaacacaggaagccttggcgcagcgcttaggaaaaggccagtcaacgattgcgaacaagctccgattgttaaagctcccggaacccgtccaggatgcgattatggagaaaaaaattacggaacgtcatgcaagagcactgattccgctcaaacagccggagcttcaggtcacattgcttgcggaaatcattgagaaaagcttaaacgttaagcagacggaagacagagtggtaaaaatgcttgaacagaataagcagaaaccaaagccgagacgcaaagcgttcagcagggatacaagaattgcgatgaatacgattcgtcagtcactgtctatggtagaagacagcggagtcagactgaatactgaagaagaagaattcgaagagtacatccagcttaccattcggatacctaaataaaaactctcctgatcagcaggggagtttttattttaatcaaaaaactattttgagataatgatagatttattgtgcactatacattatatatgtaaaaatttatctttttatgtcgtgaattgtctttttacagtcaaaaaagtcactttatcggagaacttatattagaaagtgtctttttcgtttacatttttttcacttgctgataaacaaattatgaaaaaaataaaacgctttactctttttttgataagatagaaacaagacagtacatgttcatgtgaaggtaggtgacatcgtgggaaaaatcatagcaattacgaaccaaaaaggcggagtcggaaagacgacgacttctgttaatctgggggcttgcttggcttacataggtaaaagggttcttcttgttgatattgatccgcagggcaatgcaacgagcggattagggattgaaaaagccgatgtggatcattgtgtgtacgacattttagtagatgatgcagatgttacagatattattaaaccgacttcagtagagaacttagatgtcattccggccacgatccagcttgcgggagcggaaatcgaattggttccgacgatctcacgggaggtcaggctgaaaagagcattagaatctgtgaaacaaaattacgattacatgattattgattgtcctccgtctctcgggttattaacgattaatgcgcttaccgcttcagattcagtcgttatcccggttcagtgcgaatactacgctcttgaaggattgagtcaattattaaatacagttcggcttgtgcaaaaacatttaaataccgacttaatgatagaaggagtgcttctgacgatgcttgatgccagaacgaacctcggcattcaagtgatagaggaggtaaagaaatactttagagataaagtgtatcaaaccattatccctcgcaatgtccgtttaagtgaggcgccgagtcacggcaagccgatcatattatacgatccgcgttcgagaggtgcggaagtatatttagatttagcaaaggaagtggcagcgaatggctaaaggcgggctcggaaaagggattaacgcgttgtttaatcaggttgatttgtctgaagagacagtggaagagattaaaatcagtgatttacgtcccaatccttatcagccaagaaaacaatttgacgatgagtcattagctgaactgaaggaatccatcattcagcatggcattcttcagcccattatcgtgagaaaatcattaaagggctatgatattgtagccggcgaacgccgttaccgcgccgcaaaacttgccggtaaagagacagtgccggctatcgtgcgggatttatctgaatcgctgatgcgggaaatcgctcttttggaaaaccttcagcgtgaagacttatcaccgcttgaagaagctctggcatatgactcactgctgaaacatttggatttaacccaggaacagctcgctaaacggcttgggaaaagcaggcctcatattgccaaccatttaagactgctgacgctgccggaaagcatccagaacctcattgcagaaggtacgttatccatgggacacggcagaaccttgcttggtttgaaaaataaaaacaagcttgaaccgcttgtgaagaaagtggttgaagaacagctgaacgtccgtcagcttgagcagctgattcagcagttaaacagcaatgttccacgtgaaacaaagaaaaaagaacctgttcaagatgttgtgttaaaagagcgggaatcgtatttgcaaaattacttcggaacaacagtaaatattaagagacaaaagaaaaaagggaagattgagattgagtttttctcaaatgaagatcttgaacgtatcctggaactattgtctgaaagagaagcgtaaaaaccatctttttataaaaagatggttttttatatacgtcttgtcagcttatgaaacggactgagccgttcctgcaggccttctgatttatctgtcagctgtaacccctctgctaaaacatttgccatgctcataacaagatgaagcctcgtattctgcaggacaaaatactccataaacccgctgacattgacgattccgttgatatggacgtcaccgatttcaggaaggtctttttgaacacctgctccgggcttcagcggcccatcgccgatttgaaatgaccctacgcttttgacgcggcctaaacaagcatcaaccgctataataaacggatttttatgtagatgttgaatatctttcagcttgtctttcatattgacggcgtgaacaggatctgacagcgtgccgtaaacgtgcaatctgcctaaattcattttttctaactttgttcctacgagcggacctaatgaatctccggtcgaccgatctgtaccgatacacacggtgactaacggtctgccggctgctttacgtaaagatgaagtaaggatcgcttgtatttgattcgcagcagaagaatccgtatgagaaacatattgttttgcccgttcttgagaaaaaagcccgccttttcgattcataaggttcacttccttgtcatgtcatacgagtaatacattgttgtttttggtgttgtatggttgtttacagtatatccagcgctgcctttttttatgcttatgtcatgatgagcatgccggttgtttgaaaagagcgggatagaaaaaagaactcagagcagttattctctaagttcatgaaagaaataagaccatttgatctatgtcgacatattgctgatgatctaatttcagcgctcttttttctgtagagaagaggataaatcctaactgagcgtagagtttttttgcgggttcatttgttgaagtaacagagagatggagctgttctgtgtctttcatcttttttgcctggccgatggcttctgtcaataaagcttttcccgcgcctgaccctcggtgtttgggagaaatatacatagaaccgataaccgcaatgtgtcttagtttaaacagcggatgcttggagatcttgaggattcctatcagtctgtctttttcaaaggcgccaagcacgatagcattgccggcttcaagcctggctttgaatttttcggacggccattctttctcctcctcatagctgacggcgaatgcgtcggggtgatcttttaaagctttgagcctgatatcggagtaaggctgggtatcacttgcggttaaacgcctgatgtacatgatttgagctccttatataaataaaattttctgaatagttaatcgtcgttatcataccatatttgtcccatttgtatgaatgtttgccgctgtcactcaatatagtagcaatatgcggagatgatcagaaattttatgaggtgatgagggtgtggagagccgggatgaagtggatgctgctcatattaagcagccagattggggctggatatgcaagcgggcaggaaatatggcagtttttcggtgtcgaaagcggactggctattgtattgtttacagtcatgtttacgatttcggcttatattgtgttgaagatcagctatcgggttcaatcaacgcactttttacctgtgcttgagcatttgatggggccggctcttgctaaagtctatgatgtgcttattatgttttatttgttttcaatgacgatggttatgattgccggcggcggtgtgacgctgcaaatgtacaagctgccgttttggatcggtatttttcttctttgcattgtgaccgtcggtttattcttttgggatataaaaggaatattatctttgaatagtattttgataccgattcttgtagcggggctgttatatgcattggtcttttttcagacaacccatcattacacgtggacgatagatttgacccgccagtataattggccggcaagcattaccttcacgtccttaaacatcctttctgttgtcgctgttctttcttcaatcgggaaagatatgaagggactgggagaagcgaaaatcgcaagcgttgcaagcggactgattttcggtatgatttcatttgtttacaatgaaacgcttgtacagcttgcgggcagtcttacacaatatgagattcctcttttcgccgtccttgaaggcgctccttatccgttatttctttgtatggcagccgtgctttttttagccatctatacgacaaccgtgaccggtctgttcgggctgtccagccgcatgcttgcatttgtgaaattgccgagatggacgctcgtatctcttcttttagctgtgatggtgccttttacgacaatcggtttttcagatttgatcgccattttatatcccatttacgggcttttaagtctttatttgctggtatgtcttcttctttaccctattttagggagatggaaaaaagtataatgctcattttgagtgcggccgttgctcttatcctgtctttttttgtacaataaataaagcagtctatggagagaggtgaagggtcttggcggataaagactttggcctgaatgatattgttgaaatgaagaaaccgcatccttgcggtgaaaacaggtggaaaatcattcggatgggaatggatattcggatcaaatgcacgggttgttcccacagtgttatgattccgagaagagattttgagagaaagctgaaaaaagtactcgtcaagcatgaggagcctacatcataagggctggcgctcatgctttttcatatagaggagaggaagaggcccgatgagcaaagtgcatcagtcagcgtgcccgctgaattgctgggacagctgcggctttttggtgacagttgaggatggaaaggtgacgaaagtagacggagacccgaatcatcccattacagaagggaaaatttgcggccgtggcagaatgctggagacgaaaacgaatgcgccggaacggcttcgttttcctttaaaaaagaaagacggcgaatttgtccgcgtttcctgggagcaggcgttagatgaaatcgcggaaaaaatggcggtgattaaggagacgttgggcactgccgcagtgctgcacagtcatgattacgccaataacggtcttttgaaggcgctcgaccagcgttttttcaatggatacggcggtgtgacggagattgcaggcagcatttgctggggttccggcattgaagcgcagcgctgggatttcgggcgttcttacgggcatggaccgcttgatatttatcacagcaagcatgtgatcgtatggggcagaaacgtgtcccggacgaatatgcacctctatcatcatctgcagcaggtgaagaaaaaaggagcgacactgacggtcattgatcctatttttaacccgactgcaaagcttgccgatcggtatatatccgtcaaacccggcatggatggctggcttgcggcgggtgttttaaaaatattatgccaaaccggcagaaccgattctgatttcattcaaaggcattcggtcggttttgaagaaatagaaaagcttctgcagacgatttcttttgaggagatcattgagaaaacagaaacgtctttagaagtgctagaatatcttgctgatttatatgctgacggtcccgcctccacttttatgggtcttgggatgcagagatataaaaacgggggcgggacgatacggtggattgacgctttagctgcggcgagcggaaatgtcggtatcaaaggcggcggcgcaaacttcggaaatgtgcaagtcggtgaaagctttgcaaaggccgagctcacccgtcccgatttgaagaaaagttcgagaacgttttcgatgatgactcaagccgaagaggcgctgaatgcagccgatccgccgattgagatgatcatcgtgacgtgcggcaatccgctgacacaggtgccgaatacaaaaaaagtgaaggaagcgtttgaaaaaacaccggtcacagtggccattgattcagtcatgaccgatacggcgaagctctgtgactatgtgctgccgacggccgttgttttcgaagaggaagatatttattattccagcatgtatcatcactatgttcaatatggcaagaagcttgcggaaccgcagggagaggcaaaatcagaccgctggatctggacggaactcgcaaagcgtctcggattcggggaactctttgattacagtacggaagatttcttaaaaatggggctctcttctttggagaaagaaggaatcacccttgagcaattaaaggaaaaaggacatatgccgcttccggtcaaacaggttccgtggagtgattttcaatttttaaccccgagcggaaaatttgaattcgtctcgtcactggcagaagagaaaggatacagcggcctccctcaattggaagtgccggaggagtctgtttatcatgacgccggactggccgggaaatatccgtatacgctgctgtccattcacccgcagcgctccaatcattcacagcacgtgccgtttattgaaaagcttcagcagattcaggtggatctgtcgccggatatcgccgaggagctttcacttcaagacggagatacggcagaggtatacaatgaccgcggccgtctgcgcggcagggtgaaaatcatgaagcaggctcacccgaagacagtaaatatagatgaaggcatgtgggcggcattcggaggctccgtcaacatgctcacaaaggattcaaattccgataatggaatgggaagtacgctttttgactgtctggtagcggttaaaaaaggataatctaaggagagagagggcgggaaatgcttttttctcagcttgtcttttcctatgaacctccttataattgctctaggtttacaatacgtttatatgatgatggtttgatatagaggagatgaaagaatggctttaactgctggaattgtcggtttgccgaatgtcggaaaatcgacgttatttaatgcaattacccaggctggtgccgaatcagccaactacccgttctgtacaattgatccgaacgtgggaatcgtggaagtgccggatgaacgtctgcaaaagctgactgaattggtgaacccgaaaaaaacggtgccgactgcgtttgaattcactgatatcgcggggatcgtaaaaggcgcatctaaaggtgaaggactcggaaataagtttctttctcatatccgtcaggttgatgcgatctgtcacgttgtacgcgcgttcgctgatgacaatattacgcacgtgtcagggaaagtcgatccgattgacgatattgaaacgatcaatcttgaattgattcttgccgacatggagacagtcgaaaaacgcatcacgcgtgtaagcaagcttgctaagcaaaaagacaaagaagcggtttttgaatttgacattctgtctaaattaaaagaagctttcgaacaagaaaagcctgcccgttccgttgaatttacggaagaacagcaaaagcttgtgaagcagcttcatttgcttacgtcaaaacccgtgctttatgtggcaaatgtaagcgaggatgaagtggctgatccttcagataatgaatatgttgcgaaaatccgggagtacgccgcgggtgaaaacgccgaagttatcgtcgtctgcgcgaaaattgagtctgaaattgctgaattggaaggcgaagaaaagcaaatgttccttgaggagctcggcatcgaagaatcaggtcttgatcagctgattaaagcgtcatactctcttctcggccttgcgacatactttacggcgggcgaacaggaagtgcgcgcatggacattcagaaaaggcatgaaagctcctgagtgtgcgggtatcatccacactgactttgaacgcggctttatccgcgctgaaacggttgcttatgaagaccttttggcaggcggcggaatgtccggagcgaaagaagccggaaaagtgcgtctggaaggtaaggaatatgtagtccaagacggagatgtcattcatttccgatttaatgtataggacacagttgtaaagggacaagagctttggtataatataaacttgtgagtaatagaattattgctccttgcccattatagggccgcttagaccaaaaggaggtgcaaacagatgaaaaagtacgaagttatgtacattatccgtccgaacattgacgaagagtcaaagaaggcagttatcgagcgtttcaacaacgtattaacttctaacggagcggagatcactggaacaaaagattggggtaaacgtcgtcttgcttacgaaatcaacgatttccgtgacggtttctaccaaatcttaaacgttcagtctgaagctgcagcggttgctgaattcgaccgtttagctaagatcagtgacgatatcattcgccacatcgttgttaaagaagaagaataagcaatttgaaatatataatgttaaaaggtggtctttcatatgcttaaccgagttgtattagtcggaagactgacaaaagacccagagcttcgttatacgccaagcggtgcggctgtcgccacgtttactcttgctgtgaatcgtacattcacgaaccagtccggagaacgtgaagccgatttcattaattgtgtcacttggagaagacaagccgaaaacgttgcaaactttcttaaaaaaggaagccttgccggcgtagacggccgactccagacaagaaattatgaaaaccagcaaggacagcgtgtcttcgtgacagaagtccaagctgaaagtgttcaatttcttgagcctaaaaacaacggcggttctggatcaggcggatacaacgaaggaaacagcggcggaggccaatactttggcggaggccaaaatgataatccgttcggcggaaatcagaacaaccagagacgaaatcaagggaacagctttaatgatgatccatttgccaacgacggcaagccgattgacatctcggatgatgatcttccgttctaatagattatcgctatattcataacgagaaaggtgggaaatgacaatggcaggaggacgcagaggcggtcgtgcgaaacgccgtaaggtttgttacttcacttctaacggcattacgcacatcgattacaaagatgtagatcttcttagaaagtttgtttctgagcgtggtaaaatcttacctcgccgtgtaactggaacacacgcgaaataccaacgtaaattgactatcgcgattaaacgcgcacgtcaaatggctttacttccatacgtaactggcgagtaagccgaaagaaaagagcaagagcccgcgggctcctgctctttttttatatcagtccccctccatcctgccgaatgtttcacatgaaacatggaagtgcttcttacacctttgttatcttgctcctctattcaaaaacgcgtacttaggcaatgaatttgtttatactgaaaaacagggggtggctgagatggagacagacagaaatatcctgactgatgaaaagtggagcgcaatcatacgcaatgatgcttcttatgacggagtattttattatgcagtaaaaacgacggggattttctgccggccttcttgtaaatcgagagttccgaataaagaaaacgtactggtgtttgatacggctgatgcagcgctcgataaacattttcgtccctgtaaaaggtgccggccgaacggtcttcgtcttcctgatgaagaatggattgctcaaatcattgaatacattgaacgccattatcacgaatccctgactctgagtgtactggccgaaatgtgtcacggcagcccctatcatttacagcggacatttaaaaaaatcaggggaatatccccgattgagtatatacagaaaataagattgtcgaaggcggaacaccttttaaagcatactgatatgacagtcatggagatcgctctgactgtcggaattccaaacacagcgcatttcgcgactctttttaaaaagagaaccgggagttcgcccacagaataccgaaaaaccgccaaaatgggacagggaggttcaatatgagtaaagagcctatgatctattggacactcttcacacggaatgattggagcctttatacagccgccacatctaaggggctttgctttataggctcaaattatggaagctttgaagagtttgagcagtgggcaaaaaaatcactgccgcaataccgattggcacgtgatgatgaaaagctggcgccttatacggcagagctgtccgagtacattgaacatggcagatcagttttttcagtgccggtggatctttacgggacagaatttcagcttgctgtatggaaagcgcttatggacataccgtacggcgagacatactcctattcgaatatagcagaaatgattcagaaaccggcagctataagagccgtgggcgcagcgattggaaaaaatccggtattgattacggttccgtgccatcgcgtcatcggaaaaaacgggaaactgaccggattcagaggcggtttagaaatgaaaaagcagctgctggcgttagagggcggaaacattgaaacactggaataccggctgagccggacaggagggatcacatgaaactgatttcttggaatgtaaacggcttgcgtgccgtgatgaaaaaaatagatatcaatacttacgttcaggaaacggaagccgatattctatgtctgcaagaaacaaaagtacaggacggacaagtatcattacagcctgaaggatatcacgcctattggaactatgcggtgaaaaaaggctactcaggcacggctgttttttcgaaagaaaagccgctgcacgtgttctatggactggggattgacgatcatgatcaagaaggacgggtgatcacgcttgaatttgagaacgtgtttgtcgtcaactgttacacgccgaatgccaaacgcggattagagcgaattgattaccgtcttcaatgggaagccgattttaaggattatctgcagaagcttgaccggaagaagcccgtgatcttatgcggcgatctgaatgtcgcacacagggagatagacttaaaaaagccgaaagccaaccggaagaacgccggcttctcagagcaggagcgggaagcgttcagcgccctgctgaacgcgggatttaccgactcattccgctatttatatcctgatcgggaaggcgcctattcctggtggtcttacaggacgaacgcacgtgagaaaaacattggctggcggcttgattacgtcattgtttcagacagactgaagccgcggatcaaccaagcggccatttgtgccgatatcatgggttctgaccattgccctgttgaaatgacattggatttatgatgagatagcagtaagagaaatccactcttgctgcttttttatcaccgaaaatggaggagcacatggcaaatataaaagagattgcaaaactggcgaatgtgtcggtggctaccgtatcacgcgtgttaaaccgacacccgtatgtatctgaggagaaaaggcgtcttgtgaatcaagtgatgaaggagctggattatacccctaatcgaaccgccattgatctgattcgcggaaagaccaatacaatcggcgtgattttgccgtacagcgaccatccctgctttgacaaaattgtaaacggtatcacgaaggaagcgtttgcccatgattacgtgacaacccttctccccaccaactatgaccccgctatagagatgacctatttcgaactgctgaaaatgaaaaaagttgacggactgattgtcacgtcccacgcgaatgaatgggaaaccgccgtgccttacctggaatacggccccattgtcgcttgtgaatatacacagcatcaagagattccctgcgcttataatgacaggcaggaagcatacagagaaagctttttgtatttgaaaaaccgcggacatcaagacgttgcttttacatgtgtgcggggagcggaaaaaagcccgagtacggccgacaaggtaaccgcttataaggcggttttcggctctcttgatgaaacccgcattctggtcggatgccatgatatggacgacggaaagcgggcgggtgagcacttctggggtttcgacaaggcgccgacggccatctatgcgcacagtgatgacgtggctgccggcttgtaccagtttgcgaaagaacaaaaatgggacgcggagatcatcggagagggaaatctgagcgtcagccgggcattgaatattccatccctggaacttcatttggaacgggtcggaaaggaagcatttttattgttttttcacgaagaaacggctaaaaaacaaattatgcatcaatttcagcggaaaaagtcttgagctgaaatgggtttcatgctttataaatagattgagaaaaaaagggaggcggacatatgcgaattgaacatgcagcgatatgggtgaaagatttagaacggatgaaagaattttatgagaaatacttcggcgccaaggccaatgacctttatcataatgagaaaaaagatttcaaatcgtattttctgacatttgactccggatgcaggctggaacttatgaaaaaaggcggcattgatgaagttccgtcacagaatatgaccggatgggcgcatctcgcattttctacaggcagcaaggagcgggtgaatgaattgacggagacgtttaaaaacgatggatttcaggttgtaagcggcccgcgcgtgacgggggacggatattatgagagcgtgatagaggatggggaaggcaatttgatagaaatcacagtgtaacagtgcgggggaacccgcactgttttattgattaaatttgctgtgcatttgttttcgggccgaagaggattaacagaacggaacatagaagccagcagccgccgatgaacaaaaagacgctgatgtagccgagcttaacggcaataaatccgacgagcagggagccgaatatattggaaaaacggccgagcccgtacgccagcccgctcccggccgagcgatattccgtaggatacggttccgatgtgtaggcgtataagtttgaggtgaagatccgttccgtgacgttgacgacaaacccaaacacaataatcatgacgggaataaacgtcatgccgtataacagtccggcaatggcagtcagaaaagcgcttgcggccagaatccacttcctttggaacgtctcggatatcatggaaccgagcaatgcgccaagcggcgcgccgacagagtgaagcacattataccacagcgttttttccatggtgatgccgttgcttttcagcaggctgggcacccatgaagcaaagccgtaaaagccaaaggtttccagaatccataccgctgacaggatgatggtgatctttaaattcctgccctgaaacagccctaagtagcctgcgtgcttcactgtatgtacttctgccgcctcttttggcgcgggaagcgggcctttttctttctctgcacgtgcttcaagacggttcataatggcgtttgcctgatcatatgcgccccgattttcgtgccagcgcggcgattcctcaagccggcggataaaaaagaaataaatgagaccggccgctccccatacgaatacgagccgccacccccatgagcctaaaggaatgacaaaagcggaaacaacgtttgtgacgggaacgccgatcagtccgatcatggcgcaaaaggagatgtattttcctcgtacggatgatgggaaaaattccgccaaatagctgttcgtcacaatcatggcggccgcgacgccgagcccggtcaagaagcggaaaatcattaaggacggaatgtcccatgccagcgcattcagaaaagatgaaatcgaaaagacaaggacaaaacaattcagcgcttttttcctgccgatccgatcggacagccttccgccgatggaggcgcctaaaaacatgcccaggaaggatgcggccgtgatgtcggcaatgacggacagcttcacgccccaatgctcaatcagcgccggagccacgttgctgagcgtaaacagatcagcgagatcgaaaaaatagatgattccgagagcggttaatacttgatagtgcacacgcgaaatggggagacggtctaatcggttcgctacatttgagaatgtctgatgtttcataaaaaaccccctgacttagcaattgtaatcagaaaatactgtaaatttatctgacgaatacattataaaggtctttttttggcaaaaacagagtgtaaataaccagagccaaaggaaacggcatagcgctttcttcttaaaatatataacatttcctatatctgtttctgtttatattataaaatgttgaaggaaaggaagttgatgcataaatatgaatacgtttgtacgcccagcagagggaagaaatagcgtatggagatatcttctttctctgttggtcattgtgggtttgttctttttcggaagcatactgaccgtgttttatatgtttctcacgtccgctttcaatccttcactgacgataaattgggatgagggggcattaagtgacccgctggcggatatttatttacagcatatcgtctatttcatagcgatcccgggcatttggatagcggttcgtttcattatgaaacggcggtttttatccatcatcacaccgaatcagtcgctgaactggaagagaattttctttggattcggcacatatgttgtgctgatgtttatcgcggggctgattgattttacaattcatccggatcgtttctcgcttcaggaattccatgcttcacgttttctgctcctgttagcggcggccgtcttgttggtgccgattcaaacctctgcggaggaatttctctttcgcggtcttctgcttcagttcgccggaaaattgacggcaaacgcggtggttctgacagtcattatcggcggattattcggcgcgcttcatttcggaaatccggagatggaaaatggagctctctgggcgggaatcggatatgtcaccatcggcatgatctggacctttatcacgattaaaacgggcagtctggagatgtctcttggcggtcacgctgccaataatatgtttttatttatctttctcacagaggatcattcggtgtacggcggcattccgtcgatatttacaacagcagccggcggctatgaaatatatgattgcatatcgactctggtgatcaatatcatcttcgtatggctcgcgttccgttttgtgaaaaaagaaaagcagcaggccgcctaggctctgctgctgatttgtaaggtgttcatcgcttcatcaatatccgtcgtcggcctccggcaggcgaaattctcacaaatgtagaccgttgtcttcccatcaatcatttgataacccgcggcaaagtcagaaatgccaacaagctcatccggatgttctgcggcgagaatcgtataggcgggagtgaaatgctcctgaagcgcctcaatgaaacgttttctgtccggatcatctttccttccgaaaacaacaatttctttttggggcattgtatgtgccagtacgctttgcatgaagaaagcgttgctgctcggataggcctctatttcccgtttgaacacggaaaacatcgcttcggctttttcaatcagtgatatatcacccgtcaggcggccgagacgaagcagctgtacggcagccgcgctgtttccggaaggcacggccccgtcataaacctctttttccctgacaagaagggtctcagcatcattccccgtaaagaagaaacctccgtgccgttcatcccagaacagctccagcatgcttgtacataacgttttcgctttctgcagataagacggatgaaaacccgcttcatacagttcaaggtaagcccagatgagaaaagcgtaatcatcgataaaccctttatttttcacttcgccctcgcgatagcggaccatgacgcgcccgtccggcatgaggtgccgttcgagaaagcggatggctgtttccgccatgctgagaaagtcaggctcgtgaaatacctttgcggcttttgccagcccggcaatcatgagcgcgttccatgaggtcagcactttgtcatctgtatgcgggtagcttctgttttcacgggcctccagcaattttgttcttgcctcttcaaggcgttcggccagctcatgtcctgtgaggccggtctcttcgaggatggcctcacgccgcgtgaaaatgaggtgcgggatgttttcgccttcaaaattgccttgatctgtgatgttatacaccttgcagtaaagcaggccgagttcatcaccgagaaggttcatgatttcttttttagaccatatgtaatatttcccctcacggccttcggtatcagcgtctaaagctgagaaaaagctgccgtcttcatgcatcatttcccgctgaataaacgttacgatctgcatcgcaatctgtttgtagcgctcattacccgtgacttggtaggcttccgtataggcggtcaggagaagggcgttgtcatacagcattttctcaaaatgcggcacgagccattcattatcagtcgagtagcgggcgaatccgaacccgatgtggtcaaaaattccgccgttcgccatgccgtcaagtgtcttggttacgccggccaaagcctgttccttgcccgtatagctgtagtagcgaagcagaaacatgagcatatgcggcatcggaaatttcggagcctggccgaacccgccgtacactgtgtcaaacccgccggccagctggcgatacgtgtcatgaaccgcctgttcgccaagcatgccctcagccgggtgaaccttgacttcaagatgagcggcggcgttttcggcgatatcctcgacatgctgccggtcattcgcaaacgtttcggacagatgttcaagcacatcgataaaacccggacggttaaatttgctcgtcttcggaaaatacgtccccgcataaaacggcttctgatctggtgtgacgaacacgttcagcggccacccgccctgccccgtcatcagctggcagactctcatatacacggaatccacatcaggccgctcctcacgatcaaccttgatggctatgaatttatcgtttaacataccggcgatctcttcgtcctcaaaagattcgtgggccattacgtggcaccaatgacacgtcgaatagccgatgctgacaagaaccggcttgttttcgcgtttcgctttttcaaatgcttcatctccccaagggaaccaattcacagggttatgagcatgttgaagtaaataaggagacttctcagcgattaatctattgggtttattgttagtgggcatgggatcaccttctttcatttaagttacttatttaacttaccatatttgcttgaaaaaatacttcaatgtttaacatgtataagcacagaaaattaataaacgaataactatgtttatgactatagaaattgaggtggagtttaatgaaacatagttatttttatagggattgtattcatcctcaaacacaacaagtctatcctgatggaacgtggacgtgcgtctttgctacagtgcagtcttgtcaaaatggccaatggcataacactggattaaattgcgatatccctccatattatccagtgtttcagaaaaatttatgttgtcagtattgggatgggcgtggttatcggtatagatgtgcagtcaattcatgtcctctttggggaccagataatagtgtttttaatcaagcatgggaagttttaaattgtgatgattgccatgcctaaaatttaaacaaaaaaaatgaatttaatatagcacaacgatatcaagactaaatatcgttgttttttattttaaaatcttagcattatgattatactatcttcttacttcaaataagtggtgtaattagggaaaacaaggggacttgtatatggagattttaaacgtaattttgcagttaatattggtttttgtcggttggtttataattacttatgtaaaaaaattacctgatcaagtgcatgccaaaaattttaaaaaaattgagcacgatttaaatactcagttagaagaatttagaaataaactgactactgacctagagttaatgaaaatcaatgaagctcagttacatattcataagacagaagaatttgtgagacttattaggctacttgttatgaatttgactgataaagattatataaatgacttgacaacaaatgaagaagttaagaaagagcatagtaaaagcatgactgagttaggttctaaactttttttctttgcatcagatgatacagttaaaaagtttgttgagtatagaaagcaatctttaaaaataaaaggtgataagcccacagaagctgaaagattaatagtccttttgggtgaactaatggttttaataagaaaagatttgggatacagtcaaacagaatgtgataagaatgattatttacatatcttgttgaatgattgggataagtatgaacaaaaatataataattgaggataacttttgttatcctctttttatttttttaatatcatgtcaagcctcgaaagtattactattgccgcaaaaaaaacgcaatcagattgtttgtgtgcagccaaaatgtacctttttacattaagaattgtaaatggctaattgatctgacataatacaattaatgtaaatattcgaataattttgtaaatatgcggggtgagatttgcttgaatcatatatctataaaaaagaaaggattccatatgaagttttaatatctaagttgaattcatggtatacaaccataaggaaaaacatgattgatgaaaccaaaaagaagaagtcaaaaattgaatctcttttagaagaagtcgaaatgaagcaagaggttctcctatattatcaacttttagatttttagacatgaactaatgctaatttatttgagatcaaaagacgtttaagaagttaggaatacttacgaaatttttttaaaaaagaaagaaggcagtgttttaaaaaaatgcattaatattatttcttcttttttatgggcatgtacgaattcagaagaaaagaacttgtttctgcaataaaccgcgtttagtttgtctgaaaccaaattatcagatatatctgctctaatagacgtggcactaataacatgttactgaatgtaaaaaaatccattgtcgggagattaacagaatgaaaacagcagacttcttcagaaatctgctgttttcttatcacaatatcaagatcgccatataaatacaatttgcaaaaaggcaaatcaaaactaaacttagatgtttcttttttatctaacgtacttactattcttgagataaataattaaaatccgtttctttaaatttagggagttttttgtcgatttttaaagtggacaataactcttgaacatactctcgaattgcaagcatgtcaaatgggaaatcgaaatcaaactcctctttaacagttaaagtgtccattacatatgaacaattatatttcatacccaaaagatcatcattaaaacttagtacatcttgatatgacgaatcagataactcgaaatgggagattaaaaatatttttacattattaccttcttcagaatctagcaatctttcatcaatgaataacaaaaaagcagttctgtcatcatcgtttaattccacttgaaagaattcaaaatctcttaatctcaataaacgtttaaatctcgtgtttaaagttctcatattcctttatctccgtttcttaatttaagctactatcgctttccattgaaacatagtaagggatttaaatgcaatgcctaatgccatagctaatacaataagaggtgtaggatcaattaccatctgccaccagctttttttatgtacttgttttcgagcttcagaaagttgattttcttttttcttatactttttccattgagaagtactctttaattttttgactgctgatttaggtgcttttgataagtgacttccatcatggcttgttccatccatgttttcactggcaatttctttttttccattatatacatgtacatgccatttaccagtctttttatcatgaggctcatcaaatctagctttataaccttttcctaagtttacccattctccaccagcagcgtgtgctgactggctcattgaagttgagaaaacagcaaagctaaatacaatcgtcatcataataactaatgacttacttaaaaattttaacaatgcaaacatctccttaatcatgtaatcactcaaaattatacaaaaaagagagatgtattttattgattattgaggaatttaagctaaaattaaggtaatattacctaaaaatatagggtttattaccctttgtagagattttcctgttttgagaacaaattatgacaccagtgacacgtcgaatagccgatgctgacaagaaccggcttgttttcgcgttttgctttttcgaaggcttcttctccccaagggtgccagttgactggattgtgggcgtgttgaagtaagtacggtgacttctctgtgattaagctgtttggtttgctattgtttggcatgggctcacctgctttctattcatatttgtacgtttaacataccacaatcttctaaaaaaattcagacactcaactttgtgaaccaaacccaagtcattaaaaaggagaactgcttatgactctattttcagggttaaacttcatctttccttattgctttttagataagaagtaaggatttaaaatctttatcattttatttactgttagataagtgaaacacaccccggcgactgtaaccatcccgcctgtcagtgcaataaacgtgggtacttcacctaaccacacccaagaaatgaccaaggttatggctggtgttaaataaagtgaaatggctgcttctgaagcaccgacgagtgaagtgacatacgcaagtgcaaagtaaggcacaaccgttggtaataagcctaagtaaacgatagacaatgttgagttcattgaagcgttcaaaaactcttcccctaagccaggcaagaatacaagcataggtactgtcccgccccaaatagtgaatgtaacgaatggaataaatccatatttttttatatagcgggcttgaaaaacgaaataaatactctccgaaaaagctgccagcaggattaacaaaatgccgttcactgaatttgtatagtttcctgccccaaatgaaatgatcgacacacccaataaacttatgatagagccaacccatttataaagcccaaaatgttcaccaaaaaacagacgagataacattgcagaaaaaataggtgtcatggtcacgagtaagcttgctacccctgcgctgactgttttttctccgatattcagcaaaatgtgatatagtgcaaaacctaaaaatcctaaagataaaatagcagggatatccttcatatcaggtaaacgcatatgagtcaaaacagcaaaaaccaccagtgccattgacccaatcaacaagcgaaacaaagcgaggtgttccggcgtgtaactctccaagcccgcgcgaattcccgggaaagctgatgcccacaacccaatcatcagactgtaagatatgccgattcgaactgttttctttcgcatctttctcactcctctttacaaaaaccaaccagttatttaatgtgtttctatattaataaagatttgatgatatgacttcaaccagttaaatagattttgacccaaccactttaaggaggatactttttatgagcgctccagaagaaaaaaagatgaaaaagcttcctaagtacatacaaatcattcaatttataaaagagaaaataggaaatggagaatggccgattggaagtaagattccaagccagcgcacgcttgccaaacactttgaggtgaacaggagcacagtcattacagctttagaggaattgatggcggatggattaatcgaaggcagaatgggcaaagggacagttgttacgaacaatacatggacacttttggctaagaattccgcccctgattgggatcagtatgtaacctccggaatccagcagccaagccaaaaaatcgttcaagagatcaataaatcagaatcaaattccgatcttatacagctcagtaaaggagaactttcacatgagatttttcctttagctgttatgaaagagatcatgggaaaggtatctcaaaacatagaggcattcgggtatgaggaaccaaaaggctatttgcctttgagagaggcattaagcggctatttaagaacaattgggattcaagcttctccttcttccattcttattgtttcaggcgcactgcaagccttacagctgatatcaatggggcttttacaaaggggatcgaccgtatttctcgatcagccgtcttatctttattcactacacgtatttcaatcagccggtatgaagctgactggagttcctatggataatgatggacttttgcctgaacatatccacatggcaaggggggaacgggggagggctatcttatatacaaatccttgttttcataatccgacaggtattttaatgtcagaacggcgacgagaagaaatccttgcggcaagtgagaatgcacagcttcccattattgaagatgacatttatcgtgagttatggatagatgagattcctccagatcctattaaaacaattgataaaaatgggcatgtgctttacataggcagtttatcgaaaacattaagtccgggtttgaggattggatggattgtcgggccggaaccagtgattgaacgtttatccgacataaaaatgcaaacagattacggctccagttcgttatcccagagagtagcggcagagtggtttacatccggtgaataccagcaacatctagaacaggtgagaagtcaattaaaggtgagaagacaattggtcatgagtcttttagaaaccaatttgaagaatgtcgctgcatggaatatgccgaagggaggattctttgtctgggtcaaaatattgccttcactatctatgaaattactttatacaaaagctttgacaaaagggatacttctcaatctcggcagtatctatgctcaagaaaaagggaattatattcgcttatcatatgcttatgcatctcttgaagaccttcaaaagggaatttatgaattgggtttgatgattaaagaattggcaagcagataaatatataagagacatgctatcaatgacaagaatcggcttgttttcgcgtttcgctttttcaaatgcttcttgtcccctcatgaaaaccagtaaaaaagccgctaacaaagcggcttttcttaagttaagatgccgaatgtaaaaaaaaggttaatttctactctccttgttttattcaaactcattattgggctgtataaccgccatccattacgacggcctgccctgtaacacctttagctttgtcactggcgaggaatactgcgtaatcagcgatttcttgcacggttaacaaacgtttttgaggaaccaaggggtaaatgacttcttcaaacaccttttctatagaaatgcctctagtctctgcaatatcttttaactggttttgcaccaatggagtgtcgatatatcccggacacaaggcgttgacagtaattccgtattccgctccttctaatgctgatactttagttaaaccgatcaaaccgtgtttagcgctgcaataagctgccttccctgcaaaaccaattaaaccatttatggaagccatattgatgatgcggccaaatttttgttttttcatcaaagggaatactctttttgtcgcactaaaaggagcagtaagcattaatttcagcataaattcaaatttatcagtcgggaagttttctatatccgatacatgctgaatccccgcattgtttaccagaatatccaatcgcccaaaggtttcaagtgtcttagagaaacttttttcaacttgttcttcgtttgttacatcacaaactgcagagaggacttcgtatccttgtcccttaagttcctcagctgcatgatgcacggctttttcgttcaaatcggaaattaccacttttgcgccttctttagcgaattcacgtgcaatttctaaaccaattccgctagccgcgcctgtaacaagagcaactttactttccaataattcactcatagtaacccctccaggaaacattttggtctcctaaaagtttacacccggcaattgtataagtaaaatgaataaaaagaatataatgtattcgttaaacttatggaatggagatcatacgatggatatacgccaaatcacatactttcttgaagttgctaaatccaacagttttactaaggcatcagaaaatctgcatttgtcacagcctgccttaagtaagatggttaaaagtttggaagaggaattaaaggttgagctcattgatcgatccgctagacaaatcgctttgacagatgcaggcgaaattgtatttgagcaaggccaaatgattatgaagtcaatagatgacttgtcgacgaacttatacgatcttttacatttaaaaaaaggaaaagtgaaaattggaataccgccgcttatcggtgtcttgttttttcctaaaatcattaaaggatttaaacaattgtatcctgatgtgaacatcaagctgatagaacatgggggtaacaaggtgaaacaggaggttgaagatggggtactggatcttggcgtggttattgaaccagtggacgaagagcagtttgatattattccattgcttaatgaagaactgatgctcttcgttcattccgctcacccgcttgttcataaagagattgtggaaatgcaagacttgaaaaatgaacctttcatcctgtttagtgaagacttttctcttcacgatcggattattcaagagtgtattagagccggttttcgtccaaatattgtttatgaaagttctcaatgggattttatcagcgaaatgattggagaagaactaggtatctccattttccctcagtctatagtgaaaaagactgatcaaagtttagttaaggcaatttccattgttaatccatcaattccttggaaagtggcgattattttaaaaaaaggtaaatacgtttcacacgcagtacgcgaatttatccggtatatttcatttttttgtaagagtaattacgtaaatcaagataactcatgaaaaaaatgaatggtttttatagtttttatgtattttacggttagagagggctgcgatatattatcttatgtcagaaaataagtacctttcaggaggaaattcaaatggatcaaagccgttaccaacaaggtttagacaaattaatggagtacactttaacaagcgatgataaaatctctacgcatttaaagatttctgaagacttgaaagatatcgccccagatgtaagtaagtacattatagaatttgcttatggagatatatattcacggccgggattaaccaatcaacagcgtgcgcttgttaccatttcatcccttgtaacgcaaggaaccgagcctcagcttgaacttcatatcaatacagggcttacatccggattaacaccgactgagattgtagagagtatcacccaattggttccttatacaggcttcccgcgtgtacttaatgctctttcagtggctaagaaggtgtttgcacaacgacatgtagaaagccattgagaaataaagagcttgtatggaatgcgcgatatttagtaaaaactcatcagtagaatatacacaaaacgacagcctataaggctgttttttaacattaaaatgtctgacctcttttttgtttttcggttgatcatatgtaaaagcgattatattaatcgctttttgatacttcaaaacatgctaagctttgacctctttatcagtaagcacttttaaagcatctctcacttttaaggcgaagttgacaggtttatcaatcgcttcgaaatgaatatacatcagtctcggtttgtcaaacagccagtgattgtgaagtgacgttacaatcagatcatgtttccgaaggacgctgataaatggattgctttctttttgcagaattacagtttctccgctgcaaagagcacggccgtcttttgtcattgattcaaatgaaaacatttgcggaatgagcaaaaatgatcttccgggccgtcccagtacaaccggttttatatttgttcgtgatctcattactgtacaaattccattttcaaacgtatgcatggttccgcctagaatatcgttgaattcgtcacaaagaccatgccgttcaatcatttccccgtcagtttttggtaccgcacgcacagttttagtagtcagaactctcagggcctctctcacttttcttgcaaaattgagaggtttatcaattgattcaaaatgcataaacatcagacgcggtttatcaaacagccaatggttatgaacggcagttacgatgataccgaatttgcgcagctcactcattaacgggttcacttcttcttgcagtaaaacagtctcacctaaacataaagctctgccttcccgatccatactttcaaatgaaaaggcctgaggaataaaaggaaatgcttcggctcttcttccgagtaccaccggatgaatgttgcttcgaaatcttgtcgccgtacatacgccatttacgacactgggcgttgaattgagaattctagcaaattctttgcagagccgtgatggctccatactcgtttcttccacttcatatctcctcctggaatctatttacaacgtacttagtattaaagatatgtgaagatagaaagaatgtaacgcgtcagcagtccatattagatagaatcagcctttcttgtataatttgaggttttcttccctttttataatctctttaactgttaatttttaatagattaaaagcttttgatcggactatttaagaaatgaaaacattataaattggtggttttattccagctttgatttttttgtggcggccatttgtgacaagcaccggctgcgcacacataccttatagttgtgactgagtttcagaatatgaaaaaaagcctttatacaaggctttcggtaaataattcatacagccgtttggctgctcattagtgacagctcacagctcttttgtcattaagacatgcgggatgccgtcttccataaattccggtgaatctgtctgatagcccagtttgtgataaaagccttccgcatgtgtttgtccatgcagtttacattgggtgatgcctttttcttttaccatgttttctaattcgcttatgattactttgcccaacccgtatttgcggtaaggcttcaggatgcagattcgttcgagcttgcctgtatggtttacaatgcggacgcgtcctgtgccggcaggctgactttcatgataaaccaagacatgcccgcactgttccccaagcgtatcgaactgatcaaattcatcggattcaggtacttgctgttcctcaatgaatactgcttttctaatctcaagcgctgcttgcaaatcaatttccgttgttattctttttatcctcatgatcaatcaatccttttcacatattagtctggactgcacggcttgcttgtggtcttatagaagtaacggtaaaacaattatattgcatatgcaacaaaaacatgaagggtttgaaaagatatgactgatattttgcgggaaatcggcatgatcgcacgggcactggattccatcagcaatattgaatttaaggaattagacttaacaaaagggcagtatctctaccttgtgcgtatatgtgaaaacccgggagtgatacaggaaaaagtggcggaaatgattaaagtcgaccgaacaacagcggcgagggcaatcaaaaaactggaaatacaagggtttattgaaaagcgtcctgatgatcaaaataaaaaaataaaaaagctgtttccgactgaaaaagggagaaaggtttatccattattgcaaagagaaggagagcattctgcggaggtagccctgtctggctttacatctgaggaaaaagaaaccattttcagccttcttcagcgggtgagaaaaaatatagaacatgattgggaatatgtgaagaaggggaataaaagagattattaatggtcattagttccttttagtgaatgattacgttgtgaatgattaaagtcataaatggatacgttatctgtgaaatctccttcctcggttcctgcttcaactagccgataggcttatttttaacgaaaagtatcaattatggtatatttaaataagaaaaaataattgaagcggggaatgatatgagtacaatcgaaaaacaaagacgtaagaaaatcagagcgaaatcaatcgtacgggccatcatggtcatcatcggcggaattattgccgcgtatggactggaaaccgtattgattccgaatagtgtatctgacggcggtgtaaccggactcagcattgtctgttcacagctgtttcatttgcctcttgggatcttaattgcggtgatcaatataccgtttgtctggttaggatataagcaaatcgggaaaggttttgcgtttctatcaattatcggcattatctcacttgccgcgggcacgagttttttccaccacacaccggctatcatcgagggagacaccctgttaatcaccgttgtcggcgggattattctcggctttggaatgggattggcattgcgcaacggcggcgcattagatggaattgatatgctggctgtgcttctgtcacggaaactgccgtttggcacgagcgatctcattttatttttaaacatttttgtgtttatttttgtttcttttgtattcgggctgcaaggcgcattgctttccgtcattgcttactacatcgcatccaaggtgatccatgtggttgaggaaggcttaagcggttctaaaacatttcagattatcaccaacgagcctgcattaatggtagagaccattcgtgaagaattgggccggagcgctacgtataaagaagcatacggcggtttttctcatgaaaaattcaaagaaatcacatgtgtcatcaaccgtttggaagaaaccaaactgaaggaaattattaatgacattgataatcaagcctttgtgacggtatatgatgtcgctgaagtaaaaggcagtaatttcagaaaaatccataatcattaagaaggagctgccgttcaccggcagctttttttaaaaaaggagaaaaaacttgcaaaaaaagaatggcggctgtatattattgatatatcaatcattgactagtcaattaattgcgcaaaagaaagtagggatgggttttgacagcatgttgttcagaggaaggcgagattttgtatcagctccaatcactgcacaaagtgatcggcacgaagtttgaagcgtgcaccggaatcagccaatcccgccttgagcttctcgccgtgcttttttacgtcgacgagatcagccaaagcgatcttcagaaaaaggtgaatattgatggcgcagccgtgacaagacacttgaaacagcttgaagccaaagaaatggtcacaagaaggcggaagcccgaggacaaccgaattatacttgtccggcttactgatcaggggcgggagagaattgaggcttccaaaaaggagaaggagcgtttcataaaggaaatgcttgccggtgtcagcgaggaagaacgcaatatgttaaaaaacgtattgtcgcagatgcagaataatatagaaaatatgaaagcataggagtgtattacacatgaaaacaaacgactttatggacattatgaaagggcgccgttccattcggaattacgatccggccgtaaaaatcagcaaagaagaaatgactcaaattcttgaagaagcaacgacagcgccgtcttcagtcaacgcgcagccatggcgtttcctcgtcattgacagccctgaaggaaaagaaaaactcgcgccgcttgccagctttaaccaaacacaagtcagcacatcatctgcggtgatcgcggttttcgcagatatgaacagtgatgactatttagaagaaatttattcaaaagcggtcgaactgggctacatgccgcaggaagtaaaagacagacaaatcgctgctttgacggcgcattttgaaaaactgccggagcaagtgaaccgtgaaacgattctgattgacggaggtctcgtttccatgcagctgatgcttacggcacgcgcgcacggctatgacacaaacccgatcggcggctatgataaagaaaagattgccgaggttttcggaatggataaagagcgttatgtaccggtcatgctgttatcaatcggaaaagcggcagacgaaggatatgcttcctaccgtcttcctatcgaaacaatcgcacaatggaaataaggttgaagtgaagctgagaggagagggacagtggacataattgcggctgttttcgtcggaattgtagctttagaacatatatttatcatgatacttgaaatgttttttatcaattcgaaggctgccaagcggtctttcaaattgccgaagcatttagaaggtgatcggaatgtggcggtcatgtttgcaaatcaaggtctgtataatggatttctggctgccggcctcatttggggactgatcctcggagctgatccgattggccatatgattcaaatgtttttcgtcatctgtgtggtcatcgcggccattttcggaggctttacttcaaacaaatcaattatcgtaaaacaaggacttccggctgttctagcgcttatttttcttttattggcgtagcagacggagtgagggcttccggaaaggaagccctctttttttattctgttttgaaaatcatttcttatatacatcactatagattggggaatgtcaaatcagcgggggcaagcaatggattgcagtcgcttggaatgagtatggttccggatgtgatcagctcgtttcaacacatatatccttatgtcaattttcagttgaaccaagcgtcaaatcagctgtcactccttcttaattgttatttgctgaaatagatggagcggactccatgtcaatctgtttttttgaaaaaaagctgatcggcaaatatggtatgatttacataatcagggagtggggttgcagaggatgaatacgaagagagcgtattacgctattttatacagccagaccgctatcaacttggggttttcactttatacgatggccgttatcttgtttttgtttacaaaaaccggttcgacagcgatggcctctcttatgacgctcgtcagcattgtatgccgcgtattgggcagcgccgttttgccgctggtcaccggccggttcacgcttcgttctttgttaatcagttctcaattgatacagatcacactgttagtctgtttgttttttgtcatccaaaccggtttatccgcattcttttttctgctgttttgtctgatcggaggcatttctttttgcaacggatggtttgctccgataaaaagcgcgctgattggggaaatcattcctcctgatcgaagggcgaaagcgaacagtttattatctgcggcggatcagaccgttcagtttgcggggtggtctctgggcggcgtcatcatagccttcttgggagagagcgatacaatgatcgtcactgttatgttattggtttcttcgcttttgggcatcattctgtttcttcaagtacgcatgtgtgcgccggcagcagtcaggggacgttccctttttgcagatgcggcaagcggctgggtgtatttatttcagcaaaaacagctgagggttctcattgtgatggatgtgatcgaatcgtgggcaggcatgatatggatcgggtctgtgtccttaacttatgtgcatgacgtccttcataaaggagaggcttggtgggggtatgtcaacggagtctattatgcagggacgatgatcggcggactgatcatctataagttatccggtaagtttcagcatcatctcattccgcttatgctgacgggagccttggcatatggagtgttcacgtttatttatgggttgatcacaagcgccgttacggccctttttctggtgctgtgtatggggccggcttgtgtattacgagatctcacgcaggaaacattacttcaaaacatcacgaccgaaaagacacgggtcaatatattagcagcgagatcagctttagttcagttcatttttatgttttccattattggaacgggggtcatctcggatgtattcggcgtgcggtttatttatattggcgcaggcctcctcttattaatttcggcttttttcggattttctcagctgcgaatgaagaagttggtacaaagccgcatgtagtgtagtataattaggaacatacgttctatatcgagagaggagaggggaatgtgggacatctggcactgcaattgtatgattatcatctttgggcaaatcagcaaatattcacccggcttaaagagcttccggaggatgtgtaccgtaaggagattcaaagtgtctttccgtcgatagccggtgtattgactcatgtgtatctgtcggataaggggtggtttgatgtgttctccggagagcgtctggaggatacgctgaaatcagctgaacagcaaaaagaggacatcttgtctaaagagatagaagagctggaagatatgttctcggaattatcagactggtatcaattatttttgcaaaaggaagaaaatatcagtcgcccccttgaaatagagcatccgtcaggtgacatcatgaaaaccgcagcggccgatatgatcctccatgttgtgaaccacggaacgtatcatcgcgggaatataacagccatgctcagacagatggggtatgcttctgtgccgacggattacggtatgtatttatatataaacaaaaagtaaacaagacagccaacgcggctgtcttgtgatatcagtaaaaaagccaaatcatatgagtgatttggctttttcgtttgctatgccatgttctgcagccgttctaaactgtttttccaattcgcttcaagcgctgtaaaagcagcggcggcatcttgctgttctaatgcgtgaatgatatcagagtgttcattatatgatctgtttaaagcgccgttttcactgaaatagcggatttccattctctgaattttgactttcaggcttacaagcaatttgtgaagttcggtgttgtccgcaagcagaatgatgcgctggtgaaatgcattgtccgcttccaggatggccggtttatcgccgtctttcattgtttgaagaagattttcattcagctgtttcaattcctgaatcacggcatcgtccacatgcgggagagcttgctgcaatgcgagtttttcaagcgtccagacgatggaatacaagttttccgcttcttttaactcaatcggagcgacaagcgtccatctgttcgcttttgttatcaccaagccgtcatcttcgagccgcaataaggcttcccgtatcggggtgcggctgattcccaatgtttccgacaaatccttgtcctttaactttgtttccggtttgagcttgcccgttatgatccagtctctgagtgtgcgatacacttcgtcccgcatgatggttcttttcagcacaggttctttgttttgattatccaatggaacacctcatgaatcgtagtatacatatttgcattttaccacagtccgggcgctggttagaaatgaagagggcgtctaagaatgaatcgaaccgagatgcttcatctcaatatgctgaaagtcagcggagccgccttcagaaaagagcgtgattccctgatcttcgtgttttgggaacacttcatttgtcaaaacggtttttccgtcgtctgcaaatacttcaatacttgttttgtccacgagaattttcaggtggacgcgccctttgtttccgtcaaatggggctttgctttcggcgtatgcgccggttttatcaggctggtctgtaaacgatctgttcacataggcatagccgtcttctgctgaaataccgacatcaatatgccggctttggtctgctgattctctgagtctgacgcctgcatttttgatatctgaccaagcgatgtccatatcaagctgatatatatcacctttgatcgccaatgtctctgaaccgttcacctgtttgtgttctatgctgtcagttgaagaggttaattggttcaatgcttcaaccggctctgatacaaggctgtatgtgccgccgtcctgctgctgaaggcggatttcacggacgatagaatccgtgccgttaaagccgttttttagtgtcggtgtttcattcggataatcccaattgttcatccatgccagcgcatagcgttttgtcagcggatcttcgctattaccgtcttcaaatgtgacgccgccgtaccagtcaaagccgtaatcgagccattgcggttcttcttgatcggcggtaaattccttcccgtcaaagtttccggtccaatacgcgtacgtattcggtttgcctgcgggtttgccgtttgcgcttacgcccagaacccacttggctgttccgtcatctgcacgcatcatataaaggtcggggcattcgacgaggccgatctgctgagtgataaaaccgcccgtgtatgtccaattttttaaatcgggtgattcataaaaaccgattttttcgccttcggccatggccatcacccatttgtcatcctgttcatcccagatcactttcgggtcccggaaatccttagttcccggatttttcatcacgggctgatcactataggaagtaaacgtttttcctttatccgtgctgtaccataaatattgttcctgggcttttgttttggctgtcggctgcgttgtgacggcgaccagcgcgtttttgccgaagcccgcggtgttgtgtttatcaatgacgacagaaccggaccagatatcgccgttttcgttggtgtatttcggaatagccgtgccttcgtccgtccagtgcaccaagtcctctgatacggcgtgccgccattctgtgccgttgccgttcgggtaatcccgattataaagatagtagtaatgatatttcccctcgaaaaaaatgggcttttgagggtcgtttttccatttgtccggggtcgtaaaatgatacgccgcccggtaatctttcttatgctccgtgtttgtgtcagaggaattgtggcttttgtgcggcagtaagccgacaaacaggaacgcacccaaaaagatcaatattacaatgggccattttcgtgccatgattgaattcaccatcttgtttagaaataaaagaaaatgccaatgaagtatcggcattttctttttgttgttattagttgttaaccgtaagctgtccttgttcaaggatgctgtttttaacaacggatgttttcttgtttttgatgttcaataagaagcttggcgcaaatgttgcctttttatcctcaaagaagcctctgtttgtcatgtagcttgtgatcacgacattgttgcctttggcttgcggcactgcgaagtgagagtaagtgaacgtcacatcgttaggatcaagacccatttgcagtacaagaccagttttgttcagcggcttgtaaggacctgttaaagagtttgatacataaccaagcatgtaaatatcatttgagttaataccgtcgatcgtcatttttgaaccgcgtgaatcagtgaacaggtaccatttaccgttcattttgaaaacattcgcgcgctcgatttcatcagttaccgtgtttgaagtgatcagcggcttcatgacttttttcaatgtgtagtcattgtttaattctacgataccgagggcgccgttcgctaattcagcatcgcgttttttagcgctctgctgaagcttctgactttctttacggaagaagtttgtgctgccgccgtagtacgctttgttaaataaagattcttcgccttggtatccgttatctgttcccgtgttggcttcgaatacaaggtatttatggcctttgtcttcaacgtagtgagggtctctcagcgtatggttgtcgccggatgtatagttcccttcatcgataaactgctgaacgttttggtatgtttttccgtcaccgtcaaaaatcgttttatgatcttccactccgttgatcttgagcgtgtcatcagattttgacacatttacctgcgccgttgtcaggctttgtttgccgtaatgtgtaccggaaaagtcagtgtagaataaacggatttttccatcagatgtaaaggttgcagaaccggaccattcttgtgtctgttctttcaggatttcatcgttggcgtcgaacttatcgctgtctttaaagacacggcccgcgtttttccagctgtcgatcgagttgtcgccgactttttgataaaacatgtagatggatgtgtcatcagcgtctttcgggcttccggcaagagcaaacacgacgtgatagccgttgtattcagctactgttccgtcagcgttttggagcggccagctgtcccacacatccagtccttttgcggactcgatatttttaattgttgattggtcgaattgaggcacttggtatttttcactttgctgctgtttagggatctgcagcatatcatggcgtgtgatgtgagagacgccgtacgtttctttgtaaggtttttgggtattttctttcgcgaaggcttgagtcgctcctcctgccagaagtgcagtcgtaaaagttagaactgtggctcgttttgcaaattttttgatgttcatgttcatttctccttttgtatgtacctttttttgcgatctgccgattcgatcctcctgcattcatggatggcaggtttgttacagaaaaaaagacctaaaatatgtaaggggtgacgccaaagaatacactttgcccttaacacattttaggtcttgcctgctttatcagtaacaatcctgcatgatttacttgtcgacatcattctattagactctgattctattgacaactggtctattttcctcttttggatgatagtaaaatgaaaaaaggccttttaatatatgggtaattgagactaaggggtgctctgggcctaggaaaaaacctctctaaaaaagagaggttattttttcttgatagataataaagcgatggtggctaaaatcagcaaagtacccagccattctgatattccgaagggaacatgcagccagataacagctaaaaaagctgccgacagcggctctgcacaggcgagcaggctggtttcagaggcactcagatatttcaggctttccaagtagcaataaaaagcgatgagcgttccgaaaatgatgataaacacaatcgcggcgtatgccggcaaggaccactcgccttcaaatttccagggcgggcggatcaagctgagggcggccccgccgatcagcatgccccatccgacaataatggccgatccccatttcttcagcagacgatgcggctgaagggtgtaaaacgccagtgcaaacgccgagctgatgccccaaaagacggccaaaccggatatggacaggcttccgacattcccgtgcgtgaccaaaatgaatgtgccggcaaccgccaataagacggccagaagctcttttgctgaaggaattctctttgcgcgaatcgctaaaaagcatgtaatgatcgctggccctaaatactgaagaacggtagcagcggccgcgttgccgtactcaattgccgcgaagtaggtgtattgaacgcctaacattccgaaaatcccgaataaaagaaggggaattctgtcccgtctgtctttccaaacagcccatatccgtcctttttctttgcggtatgcgatgccgagcagaagcgcccctgacaccagaaggcgtaccgaagtcagccattctgtattaaaatggcggtgctggaacagatactgggcaaccgttcccgagaccccccataagatagctcctgtcagcacaagccaaatgcctgttgttcgtgaataagaaagagcagcgtgtttttccaggatagacacccccgattctgatgttgcgaaattaactttaattagaaaatgaacgtcttacatgtgatatattatatattacatattagttttcgtcaaaatgattttcgtagaaagcgcttacaaaacggccgtctgatgaatgagcaataaaaaaacaccccggcgggtttccggggtgtgttggttattctgcaatcgcgtctgttaaaacaggaacgacttgtttctttctggatacgacgccttttaaaagagccgtgttgttttctaaagtcacgttgaatgctttttccacttttgacgcttgatcaccgatggcaagcgcaagggaatcgttttccagaatatccgtaatcacgagaaggaacaggtcaaggttcttctcggcaattacttttgaaagagccgcttctaattccggctgccgctttttaacatcttcaatatcaactgtgttgacttgggcgatttcgacttttttgctgccgagcgtgaactctttcgcatcaagagaaatcagttcttccacagtttttttgcttaagtcggcgcccgctttcagcatgtttaagccgtactcttccgcatctacgccggcaatttcagcaagctcttttgccgctgcgatatcttgctccgtgcaagtcggagatttaaataacagagagtcagaaatgattgctgacagcatgaggcctgcaatttctttctcgattttcacgttattttctttgtacattttgtttaagatcgtagccgtacagccgaccggctcagcacggtagtaaagaggttccgctgtttcgaagttggcgatacggtggtggtcgataacttcaagaacctgaacgtcttcgatatccttgatgctttgctggcgttcattgtggtcaacaaggatgacgccgtttacttcgtttgcggctgtttccaccaaacgcgggctttcctgtttgaaataatcaagcgcgtattgtgtttcgccgttgacttgtccaaggcggacgggctcagcattgaagccgagtttattttttagatcagcgtaggcaatggcagagcaaatggtatctgtgtctgggttttgatgtccgaaaataagaattttttccataataactccttgtccttttttgtagtgtaaacaatctttttatagtttaacacgtcttgaggagggtgtaatcttcaaaaccttaaaaattgatgtgaaaaagaagcatttttgttgagagttggggagggttgcgagtaaaatactgggtaagtcagatgctaatcagcatatagtatcaaaaaaggtactatggaggatgaaaaatgaacatatatccgaataaagaaggttgtccggttgaactgacgctttccgttatcggcggaaagtggaagggtattttgttttatcatatgatcggcggaaaaaagcggtttaatgagtttcggcgcatttgccccagcattacgcagcgtatgctgacgcttcagcttcgcgagcttgaggcggacggcatcgtgcatcgcgaagtatatcagcaggtgcctccaaaggtggagtattctcttaccgaattcggcaggtcgctggaaccgatcgttttgcaaatgaagaaatggggagatgccaaccgggagtttctcgaggcataccgggaaaaaacgtctcctcaagatcagtccgctcaaaaataagaagcagcaaaggattaaattccttgctgcttttttttatttcatcgcgatggcctttctggcgttgcgcacatcattcttcagcaattcgctcaggttgtaagccggatattgaccgcgttcttccatatactcaaagaccatttgatgccacttgatggcagcgtttaagtgcttgacgaaaacgtgtcttaattgaggtgtggccgtctctgtaatggctccggcataattgcggacagatgttttggccaggatgagcaggccgccgctgtaaaaggaggaatcagcgcgctcttctgtttcatcctcacgaaaagcgggagcttcagggaagaaaggaagcagttcacgcagattttgttccagcgaatggatggaaaatctgtaaagctgttttaatctggcatcgcttacgtcccgctctgttctttttaatttcacaagtccgtttgcctggaaagccactaactcatgcagttctaacgtttcatgccatgctaatgttctccgctcagtcatggtgtaagaatctcctttatccttcattttcactttcagcatatgccccggttccgatgttgttcctgatgttttgaagtttccagaaagggaaaatcaatgtaaaggaaatacgaaatagaggtgaaactatatgtgggacatgataaagaacttcttccttttcagcagcggggttttgcaggcgaccactctcttacttatcgttatcgtcttgttatatgtacgaaaaaccaaaaagaaaaacagagatacttctggtttcatggatgatcaggatcactgatacaacgggcattctttcactgggatgtccgtttgtctgttttcatgtttcacatggaacattgcggctgtccgcgctcattttacttgcgatttcgacttatgttaaaatatatacgtgtattttggagagtttatggaaaattcaggtcttgaaagagacattgcggcgtcaaaagagcagtcgtctaagctgctcttttctattcgtatgttcgaatgatacaaggtttgaggtgagtaagtgaaaaatacaagggctctaatagaaggcgccattttgatcagtatttttgcaatcatttcccttttggtcgtgtacctccctttactgggggcaattcttttctttgctttgccgctgccgatcattctttacaccattcggaacggtctgaagcccggggtatggatggggcttgccagccttcctgtcagctttattgtaagttcgtttaccgggcttacaggcgcttttacggcggcctgtacgggaattgccatgggatattattttaaaaagaaaaagcccggctatgcggttgctgccggcgctatggcgtatgtgctgtgcggcgtcgttttttttgtggtcagcatcgtgttccttaacatgaatgtggttgataccaccatgtcccagcttcgggagtcgctgtctgtggctgataccatgtcaaaacagctgggttacggagaccagttcgggaagcagatcaagctgatggaaagtcagctgagcacggttcaatatctttttccgacagtgctcgtattgaccggcatcgttttttctttcctcagttatgctatggcaaggccgcttttacggcgattttcccctgatcttccgaagatgaagccttttagagatctcaaactcccgcaaagcgttgtcattctgtattttattgtgacgatattagggtttctgcctttagaaaaagggcatatgctgtattcggtttcattgaatgggggatttattctcagcttgctgatttgtattcaaggattagcgtttatttttttctattgccatgagatggagatgccgaaagccgtgcctgtattagcaattgtgctgggggtgctttttccgctcatcttgtccgtgtatctcctcttaggcatcattgacataggctttaacataagaaataaggtgacgcgaaattgagtgtgacttacaggtggggagttgatagaaatgcctagtttttatgaaaaaccgttgtttcggtatcccatctatgcattgattgcattgtcaatcatcataatcctcatcagcatttactttaactggctgataggagccatcggtgttgtgctgctcgccgtgatcttgtttttcatcaagcgtgcggattctctgatcagaaaagaaattgacgattatatctccacgttatcgtatagattgaaaaaagtaggcgaagaggcattaatggaaatgcctatcgggattatgctgtttaatgatcaatattacattgagtgggcgaatccgtttttgtcttcctgttttaatgaaagcacgctcgtcggacgctcgctatatgacacatgcgaggccgtcgtgccgctgatcaagcaggaggtcgattcggaaacgatcaccttgaatgagcggaagtttaaagtagtgattaaaagagatgagcgcctgctttatttctttgatgtgacagaacagattcagattgaaaagcagtacgaaaatgagagaaccgtgctggcatatatcttcttagataactatgatgacgtcacacaggggctggacgaccaaacgagaagcacgatgaacagccaggtcacctcattattaaatgcgtgggcgcaggagtacggtatttttctgaaacggacgtcctcggagcggtttatcgcggtgttaaatgaacacattttaacggagcttgaaaacgcgaaattttcaattttggatgaaatccgagaaaaaacatccgtccacactgtatctttgaccctcagcatcgggatcggcgcatcggtttcttccttgaaggagcttggagatctggcgcagtccagcctcgatttggctctcggccgcggaggcgaccaagtggcgatcaaaatgccgaacggcaaggtgaaattttacggcggcaaaacgaatccgatggagaagcgcacaagggtgcgcgcccgggtgatttctcacgcgctcaaggaaattgtctcagaaagcagcaatgtcattattatggggcacaaatttcctgatatggacgcggtcggagccgcaatcggaatattgaaggtggcgcaggccaacggcaaagaaggctacatcgtcattgatccgaaccagatcggatcaagcgttcagcgcctgattgaagaaattaagaaatatgaagagctgtggtcgcggttcatcacgccggaagaggcgatggaaatttcaaatgatgacacgctgcttgtcgtcgttgatacacataaaccatcccttgtgatggaagagcgtctcgtgaacaaaatcgagcacatcgttgtgattgaccaccaccgcagaggcgaggaatttattaaagacccgctgctcgtttatatggagccatacgcttcatccaccgcagaactcgtgacggagctgcttgaataccagccgaagcggctcaaaatcaatatgattgaagcgacggccctgttagctggtataatagtggatacgaagagcttttcccttcgcacgggctcgcggacgttcgacgccgcttcttatttgagagcgaaaggcgcagatacggttctggtgcagaaagttctcaaagaatccgtcggttcttatatcaagcgggcgaagctgatccagcatacgtctctttataaagaacatatcgcgattgcttctcttcctgagaacgaagaggagtactttgaccaggtgctgattgcgcaggcggctgattccctcttatcgatgagtgaagtggaagcttcatttgcggtagccagacgggatgagcatacggtgtgcatcagtgcgagatcgctgggcgaggtcaatgtgcagattattatggaggcgctggatggcggagggcatttaaccaatgcggcaacccagttatcgggcatttctgtctcagaagcgctcgtccggctgaaggaagccattgatgaatattttgagggaggcgttcagagatgaaggttattttcttacaagatgtaaaaggtaaaggaaaaaaaggcgaaatgaaaaacgtagcagacggttatgcacataactttctcattaaaaaaggcctcgctgtcgaagcaaatgcgacaaacatcagcgcattgaaaggacagaaagaaaaagagaaaaaagaagcgattgccgagcttgaaagagcgaaagatttgaaagaaacgcttgaacagctgactgttgagctgagtgccaaatccggtgaaggcggccgcctgttcgggtctgtcacaagcaagcagatcgcagaagcgctgcaaaaaacgcataagattaaagtggataaacggaaactggagctccaagacggtatccgcacactgggatatacaaacgttcctgtaaagctgcaccctgaagttcaggctgtgctgaaggttcacgtaaaagaagaagcgtaacacacaatgaaaaacccgccgatccggcgggttttttttatgtcagcagacggcgcagcgcaagaaaatgatgagattgtttcatttccgatcgctaccagattgcatattatattacatcataacgaaggatgtgtcggtatgaaacgatttttttctgaaacatattttaataatccggagaataaaaaggcgctggagcattatccgctgatcggagacggaaaagacggggaagtctaccgcttaacacacaacaaatgcataaaatacttctttgaaaaagggacatgcaagaaggaattggcggctttaaagaccggacaaggttccccggtgattccaagactgtatgaatacggagatcgttatattgtgatggaatatgtccaaggcacctctcttgcccgccatatcagaaaagaaaaatccctgtccgtcaaactgactgctgatattttaaatatgctggatgaattaaaaagaatcggttttaccagatgggatgccgaaatcaggcacattctgattaacgaacacggaaatcttaaggtcatcgaccataaaagagctttttccgccattacccggtttcccgtaaaactattaaaaggactggacaaatacggcttggcggatgagtttttgaacactataaaaaaattaaatccgtcacgttacctggaatggcagccgcacatgtaagtttctgaaaatccgcatatgtaagtttcctttttttagggtcgtcatatgatatttgtaacatttgtttggtggagtgtggaaaaaatggcagaatacattatggttatcggcgctcatcccgatgatgaactattgggagcagcgggcaccataaaacggctgatcaatgaaggatataaagtgatttccattattacggcattaggaagaaaagaagaagctcatcatattaaacaattaggcgaacgcgcgaatcaagagcttggaattgagaaagtcatctttttggagcatacgaatttagagctggaatgtatccctcttcataagcttgtcaaagaattagagcagctcattcgcgtctatcagcctgataaaatctttacacatcattacggcgatatcaatatggaccaccagagaacattccaagcagttttaacagccgccagaccgcttccgaatcaaaagcctatcgaactgcttacgttcgaaacgctatcttcaagcgagtgggagaggaatacggctgataaactcttcaaacctaattacttcgttaacatcacagacacaatggatgccaaactcgcggcgcttcaccactatgacgtagaaatgagggattaccctcatccccgttcatatgaaggcgttaaacatttaggaagagtcagagggatgacggcgggtgtagaatacgctgaagcttttgaagtcgtgcggaggatctggaaatgatcaagacattttccgtcccgtatccgtatatggttcagacgcttgaccgctactacggggtcaaaacgctccctcaaaaaaaggcggcagtaaagacacagttaaaacatgaacatcatattccgcggttatacaggaaaaaaaagaagttatccattttgattgccacgttttgggactacccgcacacgggcggtttatcaaactatattaaaacgcttagtgaaggcctgaaaaagaggggtcataaggtcgatgtcatctcccctaatctgtttccgtccgcacaggtaaaagaactgcgggcggctgttgttccgaagttaaaagatttctttaaggacagatatggggattataacaatcatattttgaaaaataataggctgatgtttatatacgagcaaatgcttcaaaagattcatttggaaagatatgatgtgtttcatgctcaagatttatttacagccaatatattaggcagattcaatcaaatctataagaaacctttatttttcacaccgcatggcatgtttactttcaacagacttaaatttcacatctttaaaaaaggatcggtagaagagttttattataaaaaactagagatgaaagccattgaatacgcagatcgcctgattattatcagcgatacgttccgcagcccgctcatgaagctcggagccgaacaggaagacatgacaacggtgatcacaggaatcgattacgatgcaaaaacaggcgggaaaagaaaaatcccgctgccgaaaaataagatcatcatctcgtgtattgcaagattaggcccgagaaaaggacataatcatttgcttgacgcactttcacgaattccgtctgatgtgcttgaacatgttcaagtgctgatcgcgggcgacggagagatgaggagcgccttagaggaacaggctcgaaaactgaatctatctatggtctcctttttaggaaaaagagatgatgttcccgctattttgaatatgacggatatattcgtactgccgaccattaatgatagtctgcccatctcgattattgaagcgatgttcagcggctcggctatcatcgcgaccgattgcgggggtattccggatctgatccgccataacaaaacgggacttattgtcgagccgggaaatgcaaaggttcttgcccgggctttagcgttttttatctctaacaaatctgcgcgggagaaggctgcttcaaacgcaaaggcctacgcggagaaatatttaagcagtgagacgatgataaaaaatatcgaatcgatttatcaaaataccaacagctcggagggagatcatgaaacatgaacatgcagccgttgtacttgatttcagtgcaaacgggattgggatcattcgcagtctggcccgaagaggaatcgatgtttacgcgtttgacacggagggaccttatcgtatcggaaaatcaagattggcagattgcgggatatgtcccagccctttaacacaagaggaagaactgctgacattcctgactgatttcgggaagcgattccaagcaaagccggttctgtacgcaggatctgatgattatgcgggatttatatctaaattccgcgagacattagccggtttttttttatttttgctcccgagccgctctctgttagaaacggtcttagataaaagcaaagcatatgaattagcggtcaagcataacatcccctgcccgaaaaccttttttccgaacaaccgggatgagctggaagaggccatcgccaatattgacttcccgtgtattttaaaaccggtggccggccatgaatacagaaaaaaagtaaacaaaaaagcaattgtaatgaaggatgccgcacaattgcgcaaggagttcagctcctacagagaaaatggagaactgctcgtacaggagatcatccccggagacaaccagtgtttttataaagtcgccactttttatgatgaccaaatgaaattaatcggtttattctctctgcaaaagaaccatcaattccctgctgattttggcgcgggggcccacgtcgtcagcaaacggcttcctgatttaatcgagaagaccctgccgttttttgaagcgattcagctgaagggagtaggcatggcggaatttaaaaaggatccccgggacaatgtttacaagtttatcgaaattaatccgcgcttttggctcagccatagcctgacagaaccggcaggcattcatttcgtttacatgtactatctgtatttgaccggacaacatgtgaagccccagctcgaacaaaaagacggaatcaactggatttatgaggtgcgttacttcttaacgtttttgaagaaacgaaaaagaggagaaatgacgttccgggatttttggaaagggtgtaaaggaaaaaaagagtacgctctttttgcttggaatgacccgatgccatttatcagaaacacttggtctcatctcaaaaacagctggaaacggaagcggaaggaagatcggcatgtatgaaaaggagattttgtatggcgcatttcaaaaactgagaattgacgaaaaactgtcgtattcgttcggtgaaagggctgcggtgaatccggatgacatcacatgcctgaaatcaacggacagaagctccatttataaactgtctgtaaagaaaaaatccggcactgttccgctgatattgaaggtatataaatcttcccgtgaaaaaaacaaggtcgagattaatatatacgggaaagcccgttctgttttaggggatttgctgccggacatctatcatatagaagaaagtgaccatgaaacgtggatatttatggagtttgtcagccagatcaggggacagcttacatttcacccgaagcatttcaagtatattattccgtctgtcgcagaactgcacagccgcacctttgaaaacaagaatatttctgacggtaaatggcggtcgtggctgccggtatacgaatcggaaaccatgagaaaagggcgtaaaaagcagatcaaaaagacagcggaattattggatagagctcttaaagatgagcgcacaaaagatatcgtgaagcctcattatcggcaaatcacaaacttgcttgagcaagaggagccggattttttccctgaattgatacaaaacggctcagccatcacacacggtgatcttcatatgcagaatatctgcacccacgatgcgtccggacatgaaccgtgggatattcaattcatcgattgggaatccgcaaaatacgcgccggtttggtttgatatgacggtgctggtcgaaattctgcttggcttcagaaaagattggagccggcacgcagaagatattcggacgtattgcgtaaaagtgtatacgaaagaaatgaaaaagcggggcattcattttcagacccctcctatgacgctttataaaatggcttatttgcagagaacacttgagaaagggcttcatacccaattgcggagaatcttcgacaatcggggaggggaactgctgccgtatcatgttgacaaagtgtcaaaatggggacgggaattaggattataagtttgagagagggggagcggatttgaaagaagagattggcaagccgaacggtctggtgcctccagccttattgcgcgtcatggatcaatcttacgggatcgaacatcaaggtgagccagagatgctgtattcattctgtgcggaaggaaaaagctcccccaaacgaaaaaagccattgcgtattctgtacgcaacctttctccgttacccgaatgtcggagggttggcgagttatatcacatcaattaagaccggttttgagcgcatcggtcatcaggcggatgtcatctcgccgctccaaatgccgccaactttttttcaggaagatatcccgcgggccgctgacgagatcagagcgtttcttgttggcagatacggcgccgcaaatgaaaagtttgtgaagaatctcagctatttacatgtctttcaaagatttttgaaggagaaagacttagaacaatatgacctgtttcacgcgcaggatttatttgcggtatttttgctgggataccttaatcaagcgtatcggcgtcctctttttttcacgccgcacggacattttacgaaaagccggatgaagtttcataaaatccaaaagggttcaatagaagaggcatatttcagtgaaatagaaaggcagggtattcgggcttcggataaaatcattacaatcagcgactcctttcacgagcccttgctggagtacggagcgaaggaggctcagctgacgactgttcataccggcattgacattcaggatgcccctgagtcaaaacgtgctgaaaagctcgtgattgcgtgcgtttcccgtctgaccgagcgaaaaggacatgatgtgatgttggacgctctcgcccgcatccggcaccatttatccggagttgatatatggatcatcggagacggaaacatgagagggtttctggaggaaaagaaacggaaactgggcctctcaaatgtgtttttcctcggaaaacgacgtgatgtgccggcgcttttggctgaatcatctatatttgtcctgccgacattgaatgataatttccctatagcgatcatcgaagcgatgttctcaggtcaagccattgtcgcaactgactgcggaggaatccctgagatgatccggcatgaggccacagggcttatctgtcagcccggcaacagccgcgaacttgctgatgctctcgtaatgctgattacggatcagtctctcagggaacggcttggaaaagaagcgcgctcctatgcgggccggcatctgcgtcaggaactgatggtttcaaaaatagaaaggatttatcaatcatttttctgaatgataccggcgccgcatgacaggtgcttcaagagcaaaataaagaggccggtgtttaactatccagcctctttccgaactattttttcatctcatacagagtctgctgactttgtccgcccgggccgcctgtcattccttgccgggctgagcttgtttttccggtgctgtattggtcagctgagatttttgtgccgttctttttaatccatgagacaagcttcgtgttgcctgaactgtttccggataataagaaatacttcacttttccatcatcaacaagttttttcagctgtgagactgttttaccaaaattttctttacggaaaaaagaggcggaaagccatcgcttccgcctcccgcacatatatatgagagagcagcctttatttgtgatcgttctctttttggatttcagctaatttggcaagcagaatgtgctgaggcatgtgcatgattctctcaagcggcatattcagtgattctgcgagcttttgcgccgtttcggcggaaatttgcagcggtttcatgtgatcactccttccgtttctttattgtactaaaatcagaaatctatcgtaagaggatatgacaaaggaatggaggtttgaaaagcggggctttataacagaatgggggaggttttttatgcaatcgccattgatgttattacagctgaagctggctgattatcagaaaaaagccgcagaactgcggacaattgacgaatttatcatactgaaacagacattgcaggacatgatgaaagtattcgccgcctgtgaagaatgggagctgtatcaaaaaacggccgatctcatggcgcagacggtgctgcacatccgtttcatcgaataagaaaagccctcgctcgggcgaaggcttttcttaaaaggaccgttcttcttcaatgtttttatgctgatcataaatgacaagcttagacgggctgttctctttagccgtctgctccgctttctcgatcgccgcgtcctttgatgtataaagagccgtcggcgccacattttccaccttcacaaaccatccgtccgcatcaacactgggtgttactgcatatgttttcatccttcttacctcctggtttcgatttatttatcagtttcccggcattcagaatggcgaaacacgcagccgctgtttgacaaatacagggaaagtgatatttttctattctttttcatgagaaatggtaaaatggagtttggatattttttaaggagaggacggtgcttagcatgacagaccttctgaatgatcggctgccgccgcaaaacatagaagctgagcaggccgtgttaggtgctgtttttttacagccgtctgcgttgacactggcttctgaagtgttgattccggatgatttctacagaatgtcacatcaaaaaatttacaatgccatgctcgtgctcggagaccgcggtgaaccggttgatttggtcacggtaacgtcagagcttgcgaataccgatttgttagaagaggtgggaggcgtctcttacctgacggacatcgcgaattccgttccgacagcggctaatatagaatattacgcgaaaatcgttgaggaaaaatccattctccgccgtttaatcagaacggcgacctcgattgctcaagacgggtatacgcgcgaggatgaagttgaagatttattaagcgatgcggaaaaaacgattatggaggtcgcgcagcgaaaaaattcgggcgccttccaaaatattaaagacgtgcttgtgcaaacatatgacaacattgagcagcttcacaaccggaaaggcgatattaccgggattccgaccggttttatcgagcttgaccggatgacggcggggtttcagcggaatgatttgatcattgtcgcggcccgtccgtctgtggggaaaacggcgttcgccttaaatattgcgcaaaacgtggccaccaaaacggatgagagcgtcgcgatattcagtcttgagatgggtgccgagcagcttgtcatgcgtatgctctgcgccgaagggaatattaacgcccaaaatctcagaacgggaaatctgacggaagaagattggggcaagctgacgatggcgatgggaagcctgtcaaacagcggtatctttatagatgacacccccggcatccgcgtcagcgaaatccgttcaaaatgccgccggctgaagcaggaaaacggattgggcatgattttaattgactacttgcagctcattcagggaagcggccgttcgagcgacaaccgccagcaagaggtatcggaaatttcacgggcgctaaaagcgctggcgcgggagcttgaagtcccggtcatcgctctgtctcagctctcccggggtgttgagcagcggcaggataaacgtccgatgatgtcagatatccgtgagtcgggaagtattgagcaggatgccgacatcgtcgccttcctgtatcgtgatgattactatgataaagaatccgaaaacaaaaacatcatcgagatcattatcgccaaacagcgtaacggcccggtgggcaccgtctcactggcttttgtgaaagaatataataagttcgtaaacctggaaaggcgctttgatgacggcggtgttccggcaggtgcgtaaagcctcaagcaatgtcttgaggctttttttcatccgaaagaatgagagaatgccgtccgttcggcagacgaaaaaaagaaagcgcttttatataatggcatgaagggagggatgatgatgacaattgaatttccgcaatttcaagcggcgcaaatccggattgcccggccgaccggacagcttaaggaaatcatcagattttatgaagagggcctcgggctgaagagggtcggcagcttttccggacatagaggctacagcggtgtcatgttcggcctgccccatacgcaatatcacttagaattcaccgaagaaaccggctcgtctcaaccagcgcccgttccgcacggcgacagcctgcttgtcttttacatccaggatcagcaggaggtcattcgcatcagcacgaaattaaagcagatgggatatgaggagaaagcacccgaaaacccgtactggaaagaaaaaggcgtgaccatcgaagatcctgacggctggcgggtcgtcctgatgaatacaagcggcatataaatgactgtctgaagaaccctgattacgggttctttttcttattaaagcatgaaagtttcgggagtaatagatagcaaatgaaagagaaaacgcttttaatcatgtttaaggcgaacaaatatagattgataagattttaatgttcggatttaagattgactttctgtttcggcactgatacacttaatttgtttgaatgagacatcgttttgaaaggttaacggaggtgcacggatatatgtcttcagtagtcgtagtaggtacgcagtggggcgatgaaggaaaaggtaaaattacagatttcctatcagaaaatgcagaagtgatcgcacgttatcaaggcggaaacaatgcaggacataccatcaagtttgatggcgtcacgtacaagcttcatttaatcccatcaggaattttttataaagaaaaagcgtgtgtcatcgggaacggaatggttgttgatccgaaagcgctcataacggagcttgcgtatcttcatgaacgcaatgtgagcacggataacttgagaatcagcaacagagcccacgtcattcttccataccatctgaaactggatgaagtagaagaagaacgcaaaggggccaacaagatcggcacaacgaaaaaaggcatcggacctgcttatatggacaaagcggcgcggatcggcatccggatcgcagacctgctagatcgtgacgtgtttgcagaaaagcttgaacggaaccttgaagagaaaaaccgtctgcttgaaaaaatgtatgaaacggaaggcttcaaaattgaagatattctggatgagtattatgaatacggccagcagattaaaaagtatgtatgcgatacatccgtcgtcttaaatgacgcgctggatgaaggccgccgcgttttatttgaaggcgctcaaggggttatgcttgatattgaccaagggacatacccgtttgtcacttcatccaacccggtcgccggaggggtgacgatcggttcaggcgtaggcccgacaaaaatccagcacgtcgtcggtgtatctaaagcgtacacaacccgtgtcggtgacggtcctttcccgactgagctgaaagatgaaatcggagatcaaatccgtgaagtcggacgcgaatacggcacaacgacaggccgtccgcgccgtgtcggctggtttgacagcgttgttgtccgccacgcccgccgcgtcagcggaatcacagatctttctctgaattcaatcgatgtgctgactggcattgaaacattgaaaatctgtgtcgcttaccgctacaaaggtgaagtgattgaagaatttccggcaagtctgaaagctctcgcagagtgtgaaccggtatatgaagaaatgcctggctggacggaagatatcacaggcgcaaaaacattaagcgatcttcctgaaaatgcgcgccattatctggaacgcgtgtctcagctgacaggtattccgctttctattttctctgtcggtcccgaccgttcacaaacgaacgtcatccgcagtgtataccgcgctaactaagaatttgcagcaaacaagcctccggtcacggaggcttgtttttttatgtaggaaaaaaataatagatttttttcaaaaaagtagttgccactttcgaatgttctatgatattataaatctcgttgttacggaacagcttcaatagagtactgcaagaaagcttttgtctcaatgctctatgatacataatccgacacatcaagagccattagctcagttggtagagcatctgacttttaatcagagggtcgaaggttcgagtccttcatggctcaccactttttatggcccgttggtcaagcggttaagacaccgccctttcacggcggtaacacgggttcgaatcccgtacgggtcattgatttactttagcgttattgctaactccttatttgtcctcggagggccgccacgatacggctctccggacaaattactgtaaggtccggtagttcagttggttagaatgcctgcctgtcacgcaggaggtcgcgggttcgagtcccgtccggaccgccattttactttactttatagtatagaaaagaaacatctggctcggtagctcagttggtagagcaacggactgaaaatccgtgtgtcggcggttcgattccgtcccgagccacttacccaaacgcatctgcaatagtaggtgcgttttttcttttgttataaaaaaagggagagccggcttttcagccggcccagaagaagacgtcaaacactagacggcgttttttttcgtgaggtttcaaaaaaatattattttttaaaagaaaataaaaaacatgacaaaaggatggcagttcaatacgtttttgcgctgttctctttaatttttttatcttttgacctgaaaccgttataatagacggggaacgtttttcacgatccgaattgtgatcatcatgaaacatcaatagatgaaatgaagtcattctggcaggaggaaaatcaagatgatggataagaaaatccttgtagtcgatgatgaaaaaccgattgcagatatattagagtttaatttaagaaaagaaggctatgacgtgcattgtgcgtacgacggaaacgaagccgtggaaatggtggaggagcttcagcctgatttaattcttttagatattatgcttccgaataaagacggagttgaagtgtgccgggaagtccggaaaaaatatgatatgccgattattatgctgacggcaaaagactcggagattgacaaggtcatcgggcttgaaatcggagcggatgactatgtcacgaagcctttcagcacgcgtgagcttctggcccgcgtcaaagcgaacctgcgccgccagcttacggttgcgccggctgaggaagaatcagcttctaatgacattcatatcggttctctcgtcatcttccctgacgcttatgtcgtatcaaaaagagaagaaacgatcgagctgacccatcgtgagtttgaattgcttcattacttagccaaacatatcggacaggttatgacgcgtgagcatctgctgcagactgtgtggggctatgactatttcggtgacgtgagaacggtggatgtaacagtgcgccgccttcgcgagaaaatcgaggataatccgagccatccgaactggatcgtcacaagacggggtgtcggttattacttgagaaaccctgaacaggactaaccggcgatgaataaggttggtttttttcggtcgattcagtttaagatcacgctgatctatgtgcttctcattatcatcgccatgcagattatcggcgtgtactttgtgaaacaggtggagaattctcttctcaagtcctatgaattatcgttaaatcagcggattgacaatctatcctattatattgagcaggaatataaaggagataatgacagcaccgtcattaaagatgacgtcaaacggattttgaatgattttacgaagaataatgaaatacgggagattacatttgttgataaaagctatgaggtcgtcggttcttcgaggccttatggcgaggaaatagcggggaaacagacgactgacccgatttttaaacggattttctcaacaaaacaggcctattcaaaaaaatattatgatcctaaaagcaaaaacagagtgctgatttcagcgaaacctgtcgtcacagagaatcaggaagttgtcggcgcgatttatgtcgtggccagtatggaagatacctttaaccagatgaaaaccgtcaactcgattcttgcttctggaacaggcttagcccttgttctgacggctcttctcggtatatttctcgcccgcaccattacccatccgctgtcggatatgcgtaagcaggcgatggaactggcaaaagggaatttctccagaaaggtgcggaaatacgggcatgatgaaatcggtcagctcgcaacgacattcaaccatctgacgagagagcttgaagatgcccaagccatgacggaaggggagagaagaaagctttcttccgttatcgcgtatatgacggacggtgttatcgctacgaatcgcaacggggctattattcttttaaacagccctgcgcttgagcttctgaatgtttcacgtgaaacggctttagagatgccgatcacgtctttattgggcataaaagagaactttacatttgaggatttagtagaacagcaggattcaatgctgctggagatcgaacgtgacgatgagacgactgtactgcgggtgaatttttccgttattcagagagagcacggaaaaatcgacggtttaatcgcggttctttatgatgtcaccgaacaggaaaaactcgatcgggaacgcagagagttcgttgccaacgtgtctcatgagctgcggacaccgctgacgaccatgcgaagctatttagaggcgcttgcggaaggcgcgtgggaaaacaaagatatcgctcctcgtttcttaatggtgacccaaaatgagactgagcgcatgatcagattggtgaacgacctgctccagctttctaaattcgacagcaaagattatcagtttaatcgggagtggattcatatgatccgctttatgtcactgattatcgatcgttttgaaatgacgaaagaacagcatgtcgaatttatccgcgagcttccggacagaaatctgtacgtggagattgatcaggataaagtgacgcaggttctcgataatatcatttctaacgcactgaaatactcaccggaaggcggacatgtcactttctcagtcgatgtgaatgagaaagaagagctgctttatatcagcgtaaaagatgaaggtatcggcattccgaaaaaagatgtggaaaaagtctttgaccgtttctacagagtggataaagcgcgcacaagaaaactcggcggcaccgggctcggccttgcgattgcaaaagagatggttcaggctcacggcggagacatttgggccgacagtgtagaaggcaaaggaacgaagattacatttactcttccatataaagaagagcaagaggatgattgggatgaggcgtgaaaatataaaaacagtcatactgtcagtgctggtcgtcattagtcttgttttaacatggggaatttggacattccagcccaatttttcagaaggcacggcctcaaccaaatcgactgtccgggaaaagcataaaattgataaaacgagccaaaaagtatcgcaaacggtaaaaccccgggatatgtttattcatacaaacggctctcattacaaagtgaatgatgagacgctctttaatgacctgtgggcggatttgccgcaatgggaagtaaaagggatgaaggatatttccgatcaatacgacaagctcggttttaaaaattggctttacggcagaaacggcaactcggcaaagctcgatctgcaattcaatgacaccattccgattgatttcttccaaacgatgtttaaatggtcgaatccgtcaatggaatacagctcatttgaccatattgtcattccatttaatgagaataagacaaataaaaagatttacatggtctcatacagcaagcagctgattttggaagtgactgtggaatcggcgaattaccgcaatctgatgaatgagctgtacagcaaaaagtcgagtatgccgttataccacctctattcggtcggaaaaagcaaagaatttctcatgccgaatgcgcggtttaatatgaaggaaaaagaatttattactgaaaccattaagacgaacctgtttaagcagacactttttaatgatccgagcacggtcagagaagacccgaattacaatcggaatgtgctgactgacggaatcagccgtctggaaatcaattcgacacagcggcagattcaattccagcatcggaacctggcacaaagcgcttcttatcaaacaggcgagctgattaagaaaagctataaatatttagaggatacgggaagctggacggatcattatcaatttttcaatgtgagtgataaccagcagctgagtttctacatgtttaaagaccaaatgcctgtgatcaacagcatgtctaagcctttcggatccggacctgttttgaccctgcaatgggccaatgacgaggttctcagctacaagcggccgaactatgttctcggaccgaatccgattaaaacaaaagacgtaaaaatgatgaacggcaatgaggttgtgtctctgctggagcagcaggataaatacgacgtgaacaaaatcgaccagatcttcctgtcctatcaaatggtctcttcatcaacgaatgatctcgttgagctggaacccgtctggagtatgaaaatcaacgggaagatcgtcccgattacgaaagatctgctggggaaggaggaggacgataatggagtggaataagacaaaaacgatcttcatcattgccttcctcatcctcgatatttttctcggctatcagttttttgaaaaacgctcgagcagtgaatacgaagtgattaaaaattcaaatgtggaaaaagacatggagatggatcatatcactttcggcaacctgtcttctgattccgcgacgggctaccggctgacggcgggccaaaaggtatttaccgcagaagatattgatgctttgaaagatcaaaagcctttaatggagatgccggcggatgatcataaggttacgacgctgaaaatgaaacttaccgatccggtcggtttatcgaagcaaaaaccgcaggaggatgcggaatcgctcgtcagctctaaaataaccggcggtgaaaaatataaactgtggaaagtcgacaaggataaaaaacagatcattttttaccagatgtatgacggccagtttatatatcaggattttgactcgtccacggatgcgatcggacaggtgattctgcatctgaacgataaaaacgaggtcgtatcttacgagcagaccatgctggagtcattcaagcgaatccagacggagagcctgattcctgagcttgatgcggtcgaattattgtattctcaaaattacttaaaagcgaattgcgccgttaaaagcgttaagttcggctatattgcccaatatccgctgacaagtacgcaggtgctggcgccggtatggagaattacaatcgaagataagtcaaaagggacgaagaaaaagacactgcaaacgtacactgtgaacgcattggaaagtacagtcattgataacaatcaaaataaataatggagtgagacacaatgggcttgcaatttagcgtgcttgcgagcgggagtaccggaaatgcgttttatctggagacagatgagcactcttttctggtggatgccggcctgagcggtaaagcgatggacgggctgatggagagaatcggccgcaagatagacgacgtcgacggcatctttgtcactcacgagcacagcgaccatattaaagggctcggcgtcattgcgagaaagtacggacttcccgtctacgccaatgaaaagacgtggaaagcgatggagaatcagatcggcaagctggataccggacaaaagtttctgttcccgatggaaagcgtgaaatccttcggcgggcttgatgtcgagtcattcggcgtctctcatgacgcggccgagccgatgttttatgttttccactaccaaggcagaaagctcgcgctgatgacggacaccgggtatgtgagcgacagaatgaaaggcattatccgttcggccaatgtgtttgtgtttgaaagcaaccatgatgtcggcatgctgcaaatgggcagatacccatggagcattaagcggcggattttaagcgatgtcggccacgtctcgaatgaagatgcggcgctcgccatgactgatgtcattggcgacggcacatcgcgcatctatttggcgcatctgagccaagacaacaatatgaaggaactggcgagaatgtccgtgcagcagacattggctgcgaaaggatttgtcgccggggaaacgtttcagttatttgataccgatccgaaaatcccgacgccgctgtgcgccgtgtaatttttccaaatgaatcatgattattaatccgcgatctgacccacactataagcaaatcgagtaaccttgaaaggatttgagatagggtggattataatcgcgatgatgaacagtacgcctccgaacagccccgccgcagcaagagagggtactttctatcaagtctgatcggcgtcatcgtcggggccgcgctcatggcattcctgctgccgtactggacaggcggagaccatggggaaagcagcaaaagcaccagccagcgtctcggcagcgaacaggtgaaaacagtcaacgtaaatgtcaatgacgctgtcacgaatatggtcagccgtgtatcggattcggtagtcggcgttctcaatatccaaaagaccgatatttggggagagggcggcgaagcgggaagcgggtcgggcgtcatttacaaaaagaacggaaacacttcttatatcgtaaccaatcaccatgtcattgaaggtgcgactgagattgagatcagcctgaaggatggctcacgcgtgcctgctgagctgatcgggagcgaccgtctgatggatctcgccgtgctgaaggtgaagtctgataagatcaaatcggccgcccagttcggcaattccgatcaggtcaaagtcggagaaccggtcattgcgatcggaaatccgctcggacttgaatttgcgggatcagtgacacaggggatcatttcaggcacggaaagggcggtgcctgttgactcaaacggcgacggacagccggattggaatgcggaagtgctgcagaccgatgccgcgattaaccccggcaacagcggcggcgctttgatggatatatcgggcaaggtggtcggcatcaactcaatgaagatcgctgaatccgccgttgaaggcatcggcctgtccatcccgtcaaagcttgtcattcccgttattcaggatttagaaaaatacggagaagtcagacggcctttcctcggtattgagatgaaatccttaacggatattgcgagttaccattggagccagacgctgaaacttccgaaaggcgttaaaaccggggcggtcattatgggtgtcgacgcgttttcaccggcgggaaaagcgggtttgaaaaagctcgacgtgattaccgggttcgacggacataaggtcaatgacgttgtggatctccgtgagcgcctgtatcgcaaaaagatcggcgaccgtgtgaacatcacgttctaccgttcgggaaagaaaaaaacagcggaagtcaaactgacagaagcggatcgattacaaaaataaaaaaacagcccggatatccgggctgttttttattgatttatttgttaatattatactattgtgaaaacgggaggtgaaacacatgaaaacggctgatgtgatcatcgtattgaatgaaattgaaggtgaatgtgaaggaagaattattttagaatgcagaatttaagaacatgaaacatgtcataccaaacgtcctttttcagggcgctttttttatgccttttttcagaggccataaaaaagaactgaacgcgggtcacaacacgttcagttaaaaaatgggtatatttagaaaaaggtagacatgaacttagaactttgtgattgaaacagactggtgctgctgaattgaagcggcagatgaaactgccggcagcttttttgttgttatttgcagatggctccgttttgagcgtttactttcaccaattcagcttagattccgttttgtttcagataaaagcgaataatagaaggggaagcgaaaaaaataaacacaggctgatacatctaaggagagactgcatcatggagaagttgaaaggcatcaagctgctgagtgcagacggcgagtctgcactcattgattctttaacgatggggcttcatcacggaacggtcctcggagaagacaatatcgtcgaggtgtacatccgttctttgcgcgaaaagctgaaggacaaagaacacaaggtgattcgcacggttcggggcgccgggtacagggtggatctggcatgaaacggctgtacagaaccctgcgattccagctcctgttcaggtcactggcgattttggctttgctgttatgttttatcggcggcactcagtacatgtttatgacacggacgatgtatgaaaatcaggcgatcagcattcagagtgatatcaattcaatggatcaaagcgtatggaggtcaatcacaacccttgcccgttccgaaacaccggctcatccgaatttgatttaccccggggtgacggttgcttttatcaatccatcatacaagatgtctgttttatcagaagacccgcacgcgggggccgctccttcttttccgaaaaaagtgtatcaggatgcgctgaaagatacaatggcgcttcactatcaggtggctcacaataaggcgggtgaggaaatcatcgtcgtgtttcaggcgatttccgttgacggaaggcaggcgggagttgtgcagatgagcacgctgacccagcctctgaatgattcgcttttccgccagatcagcattttcgcggtgctttcctttgcggctttggtcatcggactgtttgttttcttgccggtgatccggctcacactcaagccgctgtcccgcattgtgcgtatgatgggtgacattcatgccggaagtctcgataaacggctgccgatcgacaggaagcaggccgaaattgagtcattgggcatctccatcaatcagatgctggaacggattgaaacctcttttcaagcggaaaaagaagcgaaggaacgaatccggcagtttgtatcagacgcatcacatgagctgagaacgccgcttacctccattcacggctttatcgaaattttaatgcgcggagcggcggagaagccggagcagaaagaaaaagcgcttcaaagcatgtacgcggaatccgccagggcaaataagctgatagaggatcttctgtttctcgcgaagattgaccgggtgccgagctttgaaatgaaaaaaggcgcattgggagacgtcattttggaaatggaggctcagctgaagctgctcgcgagaaaccggaagctcgagttctttgtcgatcaaaagatagaagccgtttttgacaaagacaaaatgaagcaggtcattctcaatctattttacaatgcggtgcagcatacggatgaagacacgggtgtcatcaccgtctccctgcagaaagacggaggaatcatgcttatgattgcggataacggaacgggaatcgctccggagcatgtgcctcatttgtttgaccggttttacagggcggaaacctcccgatcccgtcaatccggcggcgcggggctgggtcttgccattacaaaaaccattatcgacagccataacggaacaattgaagtgaaaagtgagcagggaaaaggctccgtgttcatcatccggctgccgggataaaccgggaagcaggaagaaatatcacaatttatatataaattctaaattttcaaaaaataacttgtccttttccaatattgatgataatatctagttattggtaaagggggtgtgtactgatgaagattgaagaacttgatcttgatacagaaacagcaagcttggtgcatcgctgctagtaaagccgtgactcccctcattggggagttattatctttcagggggtatgtcatgatgtcaactgactgtaagcgctggaagtttaaagacagcgtgcaggtgctgacctacacggcgcatattatcattcaatatcgaaaggcgattaagcttgcgcatacgagtgagatcaaagaggcggttgaacggctgatcaccggctgtgaaaaacaagagctttctgatcttctgggggaggaagcgggaaaccagtttttcgatgcgttaatgaaattggatgctttaatagagccatggcaaaacagccgtgaaggccgcatcactgaaaagcagctgtaccattttgagaaatacaaccaaaaccccaatctgatccaagagagattagacggcagcagggcagcgatcgtgggtctggggggcgtcggaacgatcattcttcaaaaccttttggcggcgggcatgcagcattttattctcattgatttcgatgccgtatcagtacataacctgaacagacaattcgtctataataaatcttctgtaggcaaattaaagatctcagaatgcagagattatattgcgggtatcaatccccatgcggacgcagcactttaccataaggaaattacacagccgcaggacctgcgtgtgttagatccgtatgaaattgatatcgtcataaatgccgctgacaaaccccataacatttctgaatgggtttaccggtattgcaaggagcggaatatcgcgtttatgaccgggggtgtcggcagcttcagcggccaatgggggcctctgctcacgcctgaatcctatcaatccggcatcacctatgaaaaaaacatgccggccggacttctgaactgttaccccgatgagccgatcaaaggttccttaggagcgacaaacggtattatatcctcgtttatgtctcatgacattatcacataccttgcaggcggaagcccgaaatccctgaatacccgcatcggcctggactttgacggacttcatattacagaaacgaagctttctcaaaaggaaagcgctttatgaagacgatgcatcgtacggcgagaaaaccgggcgaccctctgaaaatagaaatcgacacaagcccgatacgcttgaacccattagatacgcaggattacacaagcaagatgatttgcagcattatgtatgaaagcctgcaggacggctataactgccggatcatccgcaaagatccccgcacctgtcaggtggacattcacccggactatttaggtgacgccgagggtgtggttcaaacgatcatctatcatctgacgaaagaaaatcaaagcccccatctcggcagtttcctgaacataaaacaggccgttccgtatgtaaaaggccttgtctcatccgatcagctcggggtgaacgtaacaggcgataaacgctttgaagtcaccttggacgagccgtctgatgagatagaagccgttttgcagagcagctttctgattccggggaccgccgggggcgatgtgccggaaaacggcccgtaccgattcaagcgaacgtttgagaaggggctggaatttgagcggaatccgcaatataaaatgacgcccgcggatcaccgcacggttcagaccatccaatttattttgaatgatgatctggaaaaaagcatcgggctgtacgaagcgaatcaaacggacgtgacctgccacacccagtttcatcattcaaacatgaggtatcggcagtatgctgattttaaagaaaatcatttgccgatgttatttaccttcaaggtaaaggacggcatgctgagaactttcattcagcattattttgatagacaaaagctggccggggatttggggcatatcatcacaccgactgattcactgatcggtatatgggaaagcgggaggacaccgcagaaagatccgccccttttgacaagagaagagccgatccgaatcgtttatgccgattattatcccaacggagagatcattgaaaggctggctgatctgtttcggcgggccggagcggacgtatccgtctcacgcgtcagtcatttcaatgattattatcatatggataaaagcgggtttgatattgaactccatttgttcctgccggcttacatgcatgagctgagctatatcaaatatttcatccgcgacatcagcgatccggagaagaaaaaaacgatcattgatgccataggatctgaaaaaaagaaggaactttttgggttattcgagaatacaactcattattgcccaatttgttttgggaaaagtctgtatctgcaagatccatgtatagagggttttagtgtaaagactgacgggctcctttctgttcatgatgttaaatgcagatagctggaaaggggtattcatttgcggaatcgaaatttgctttacttctccggttttttcggaaacttctttttcgaacggggaatttggattttatatttaacaagcatgaattattcattgtttcttgtgggcatcctgcaatcggtcctgaatttggcgatgtttctggcggaagtgccgagcggcgtcatctcggacagaatcgggagaaaaaaatcgctcttgctcggccattttatggtcattatctatttggtgatgttcctgagcttccataacttcatcgccctcttcatcgcccatattatatacggtatcgggctgacgtttatatcaggaacggatcacgcctttttgtttgattcactgaaagaacaagggaaagaaaagtggtacggcaaatccatcggaaattataacggacttgtcatcctcggtcttgcgattgccatgggcatcggcggctacttgcaggaaatatcatggtcatatgtgtttatcgccgggattgtcactcagctgattgcaatggcggtcattacacagctgacggaaatcaaatttgaaaacagtgaacacgaaacgcagacggtcggtgacatcttaaaagaagtcaaagatttcttcagactgaacaaagcctttaaatatctggtgctgtcactctccgttttctttgcgattacatcggttttttatatgtacggacaagatttgttaagtcaggaagggctgtccgtgcgcaatatatccattatttttgcgggactgtccatcttgcaggcgctgtgctccatcttttcttccaagccggcggaaaaattcacgccgaggcgcgtgcttctgctgacattctgcatcatcggggcggcctatctgtttataccttcgggcagtctgtacgtgacgattgcagcttttgtcgtcattaacgcgctctatgatgtgatagaacccgtatccagtcaggtggtgaataatgagattccgtccagaacgagagccacgctgctgtccattatcagtttgatgacctcgctcttcatgttcattgcctttccgtttatcggattcttaacggactattttgattcagctttgctgctgaccgcaatcggggtattatccatcttattgtcgctgtttatgatgctcagcttttacaaactgaaagcgagcgtcgccatccagaataaagtcgagctttgaaccagaatgacaaagggatgatgtgagttgctgaatattcataatcttacggtaaatttagcaggggatacgattttcaaacaagtttcttttttcatcaatgaaggcgaaaaagtgcttgtggccgggccgaacggttccggcaaaagcacgctgttcagggtgctttccggagagcttgaggcagatgaaggaacgattgcgatcaacaaaggggcgaaagtcggtttgctgaagcagatcgctgatccccatgaggatctgacgttgtatcaatatctggaaaaatcgtttgaagctctcgcggcgatccagaaggaaatgaaggccattgagctgaaactttcggaaccgatgagtgatgacgagctgactgctttattggaaaaatacagtcaatacacggaaacatttgagcggaacaacggctaccagatgcatgcgatgattgacgaggtatgcaacgggctcagcctcagcgaattaaaggatcagccgttttcaaagctgagcggcggcgaaaaaacaaaagccggccttgccgaaattttaatccgcaacgacgacgttatattgctggacgagccgaccaaccatttggacgtccatgcgattgagtggcttgaagggtttattaaaaaatcgaacaaaaccattctgtttacgacccacgataaaacgtttgccgaccaaacggcgatgaaggtgctcgagattgacgataccgaggtgaagatttggccttacggtttcagcgaatacttgaaaaagcgggaagaattcatcatcgcccagtttgagaaatatgaagaacagcagagaaaaatacagaagatgaaggaatccatcgcccagctgagagattgggccaaccgttcaaatccgccgtctgtcggcctgcacagacgcgcgaataatatggaaaaggcgctgaaaaggattgagctgattaataagccggtccggacggagcaaaaattaaaaaacgcatttcaggaagcgggcgccggttcaaaagatattgtgttcattgaaaacggaaaggtgaccaacggatcttcccttttatatcaaaatgtgaacctgcgcataaagcataaagacagaatcggcatcgtcggcagaaacggcgtcggcaaaacaacgctgatccgctgcatcatcggggaaagagaactgtcggacggcaccattaaagtgggggaaaatcttaaaataggctacattgatcaaaagagccatgtaggagattcgagccagacgattctgcaattctttaaagaaaatctgctgactgaagagggcatggcccggaatatgctggccaagtacggattttacgggtcgtcggtctttaaaaaactttccgtcctgtcgggcggtgagagaatcaggctgaagctgtccatcttaatggaaaaaaagctgaatgtcctgatcctggatgagccgaccaaccacttggatattgaatctcaggaaattctcgaaaacagcctgatgcagtttcaaggcaccatcatctgcgtttctcatgacagaaacctgctggagaagttcaacaagattttctggcttgagaatcaaaacgtcaccatcttttcaggtccatacagttacgccaaacaaaaaaaacggcagattgccgaataaaaggggaatggatatgaccattgacagactgacaatcaatgagttatcgtacgatctttttgtaagcgagtatgctgataagaaaccttttattttgacgggggcaatggatcactgggaatgcaggccgtggacgcttgaatacattgatgaacactatggagacagaatggtcaccatccggaaatcagatatcgaaggggtcaaaacgtttaaacaagtaaagctttccaactatatcgagtacattgatcagaatgatgacaaatggtactgtgactggaattttacgcagctgaaccaaaatgacttagaccttgtctattccgcacccgaatattttacaaaagacacattgagagcggatgaagaaacgggacgggattggaaatggttctttctcggttctaagcagacaggcacaccgctgcatcaggattttaacaacacgcacgcgtggaacggcgtcattttcggggagaaggaatggatcttctatcatccggacgactctccgtatttgtacgaaggaaatatcaatgtctttgatgaaaaagacattgagcaaaaaccgctggtgcaaaaggcgtctccgatccgcttcagacaaaaggcgggagaaatcatttacgcaccgcgccattggtggcatcaagtcgagaatacggaacatacactggcagtgagtgagaacttttggtttaccggagagcggcttgccaatcaggtataaacgaaaggctgaggagcatctcagcctttttttgtatggattcatttcatccggtccagaccgaattttttcaggcggtattgcaggctctgtctgctgattccgagctcgtttgccgttttggaaatgttattgccgtgttttctcagggttttttcgatcatgtatttttcgaagttttccattttgtcttttaaatctgtgccgggctgggtgcttgcggcggctttgctttccgtgtcagcgggtttgattttcatccggtattgataaggcaggtgggccgccgtaatcgtcgtttcatccgtcataaagttcatggcgccttcaatcatatgttcaagctcgcgaatgttgcctggccagtcatattccaggaaaaatcgctgcacatcgtcactgatcgaatcgacatgcatttgaaacaggtgattgtttttctggataaagacttcggccagaggcagaatatcctcctttcgctcccggagcgggggaatgatcagcgtgacaacgcttaagcggtagtataaatctttgcgcagccgctcttctgaaatggcggtgatcgggtcttcattcatcgtggcgatgatgcggacgtcaatcggtttgtcctgagctgatccgatgcgcctgattttcttttcctgcagggcgcggagcagttttgcctgcaggctgagattgagcgagttgatctcatcaaggagcagggtgcctccctgcgcctgctcaaataagccgggctggtcgatggctccggtaaaggcgccttttttcgtgccgaataaaatactttcgaccaggctgtccggcagggcggcgcagttttgtgagatgaacggggcgcctgagcgctggctgccgttgtgaatgctttgggcgaacagttccttgcccgttcccgtctcgccggccaaaagcaccgatgatgaggtgcgggttgcccgttttgcgttttcgatgacttcccgaataaccgagctgttgccgagaatactgtcaaacgtgtagctgttctgttctttcctgtgcatgttctccctgatcagccgttcgagcttggtgacgtccttggcgatttccacggctcccttgatttcgccgttttgcacaatcgggaaggtgtggttgatcgtcgtgatttcctggcctttgttattgaaatagctttgctttacatttttaatcgttttgccttcttgaagggcctgaacgagcgtgctgtcctgctgattggaaaacataaatacatcagtcaggtttttatgcaggacgtcccgttcatccatatcttcaatctgcatcattttcttattgtaaatgacggtgctgcccttctcgtccaccacatgcagcccgacatcaatctcttccagaatgctttgtaacacgagtgtgtaaaattcgctggttgtgtgcaggtcaattccccctctcaatcgtcttaacattcattattttaaaataaatcgaacgggaaacgcaaaaaaattttgcgcttggacgatgtttaaaaataaatggaaattgaggtaataaaaccattgacttttttagggaaatgattgatatttagatatatacttaaatatctaaatcatgtacgtatgagagggggaaagtttttgaataaagcttttaaagcactggccgatcctacaaggagaaaaattttggatttgttaaagaaacaagacatgacagctggcgaaattgcggaacacttcgacatgtcaaaacccagtatttctcatcaccttaccatattgaaaaatactgatttggttcacgatgagaggaaaggccaatttattatgtattcattaaataccactgtattacaggatcttataggctggttcttttctctgactgattcagaacatgataataagaaaggcggggaatcatgaaaaaatatctcttttcagcaggaatcatagttttaactgttttcacatgggtttgcacatattcatctttaccggacaatttggcgacacactggggattaaacggaagtgcaaatgattaccaaacgaaagctaatgcgatgacgatgcttattggcatcatgattattctatatattttaatggttctcacccctaagattgatcctaaaaataactacaaaacatttacccggccatatatggctatatttaatacaatgtttgcggttctgtttgtcattaatctgatgaccatcttgaccggcctgggatatgatctctctatatcttatttaggaaactttatagtgggagtcattttcatggtgtttggaaacttcattcagatcgttaagcctaatttctttttagggataagaacaccttggacgctgagcagtgaaagagtttggaaggatacacacagggttagttcgaaaatttttgtcttagcgggcatactcatgatgcttgcagcttttttgccgccggtatatagagtgtcagtcattttcattgcggcaatcggctgtatcatattatctttactatattcttacattgtatatcagagacaattgaataaataattgttggataggagcaatctaattggattgctcctattttgtcagcgggaaacgcaaaaaaattttgcgcttggctgaagtttgcacgcaaactgccggaatattttgcaggaaaagaaagaatgctggcgaaacatcccgttttttcggattggcacggaacttgctttataaaaagggaaagcaagatctaatgttgaatgattacaaaacaagggggaatcagattatgtcagctttcacaaaatctcaagaaattatcagccaaacttcacattacggcgcgaacaattatcatcctctgccgattgttatttccgaagcgcagggtgtttgggtaaaagaccctgaaggcaatcaatatatggatatgctgagtgcttattctgcggtgaaccaggggcacagacatccgaagatcattcaggcgctgaaggatcaggcggataaaatcactctgacgtcacgcgcgttccataatgatcagctcggtccgttttatgagaaaacagccaagctgaccggaaaagatatgattctgccgatgaatacgggggcagaagccgttgaatccgctgtcaaagcggcgagacgctgggcatatgaggtcaaaggagtagcggataatcaggcggaaatcattgcgtgtatcggcaacttccacggcagaacgatgcttgcggtatccctttcttcagaagatgagtataaacgcggtttcggacctatgcttccgggtataaaattaattccatacggagacgcagaagcgctgcgccgggcgattacgccgaacacagccgctttcttattcgaaccgattcagggagaagcgggcatcgtcattccgccggaaggatttttacaagaagcggccgccatttgtaaggaagaaaatgtacttctgatcgctgatgaaattcagacgggactcggccgcacagggaaaacattcgcggttgactgggaaaatatcgtaccggatatgttcatcttaggcaaagcgctcggcgggggcgtcttcccgatttcgtgcatcgcggcgaatcgtgacattctcggcgtgtttaacccgggctcccacggctcaacattcggcggaaacccgctcgcttgcgcggtatcgctcgcatctcttgaactccttgaggaagaagggctggcagagcgttcccttcagcttggccgttattttaaagaagagcttgagaaaattgataacccgatcataaaagacgtgcgcggtcgcggcctgtttatcggcgttgaactgacagaagcggcccgcccgtactgtgaaaagctgaaaggcgaagggcttttatgcaaagaaacacatgataccgtgatccgttttgcaccgccgttaatgatttccaaggaagacttggactgggcgatccaaaagatcacaaatgtgcttcaaaacgcgtaaaaccttgatgcggcaatgctttccctcggcttgtatggaatttacaaataaaaaattcagcacactctatttgcgcggcgacagtattttagtataatgtatctttatgtacgaaaatgaatttcatataacattcatatacaaatagaggctctttggacagcaaatcggtttcaaagcaccggcttggttccaatacaagttgctgaaggggtgcagaatagtgaatacaaatcaaaaagagaatcagcttcagcgcacaatgaaatcacgccatttgtttatgatttctttgggcggagtgatcggcaccgggtttttcctgagtaccggatttacaattaaccaggcgggaccgctgggcgcggttctgtcttatctggtcggcggttttattatgtttttgacaatgctctgcttaggcgagcttgcggttgcccttcctgtatcagggtcgtttcagacgtacgcaaccaaattcatcagccccgctttcggtttcgcattcggctggctgtactggctcggctgggcggtaacatgcgccattgagtttttatctgcgggacaattgatgctccgctggtttccgcatgttcccgtatgggtatggtgcctcgtgtttgtcggactgatgtttcttttgaacgccattaccacaaaagcgttcgctgagtcggaattttggttttccggtattaaaattttagtcattctgctgtttattattttgggcggcgccgccatgttcggcctgattgacatgaaacacggcgagcaggctcctttcttctctcatttttatgaggatggattgtttccgaacggcattaaggctatgcttattacgatgattaccgtaaacttcgcgttccagggaacggagctgatcggggttgccgcgggagaaagtgaaaatcccgagaaaacgattccgcgctctatccggcagacggtatggagaacgcttgtctttttcgttctctccatcatcgtcattgccgggatgattccgtggaagcaggcgggagtggtcgaaagcccgtttgtcgtggtgtttgaacaaatcggtattccatatgcggccgatattatgaactttgttatcttaattgcgctgctctcagtggccaactcaggcctgtttgcatcgacgcgtatcctatatgccatggcgaacgaaggacaagcctttaaatcgctcggcaaaataaataaacgcggcgtgccgatgaacgctctgatcgtgacgctggccgtcgcctgcctgtccctgctgtctaaggtggcagcgccggaagtcgtttatatgtttctcttatcattagccggactaagcgcgcaggtcggctggattacgatttccctgtcgcagctgatgttcagacggaaatacatccgcgaaggcggcaaagtggaagacctgaagtttaaaacaccgctgtacccggtgctgcctattatcgggctgacgttaaatacggttgttctgatcagtctcgcatttgattcagaacagcggctcgccctttattgcggcatcccgttcatggcggtgtgcgttatcgtttatcatctgtatgtaaaaaagcataagcagtcagaaaaacagatagagctttaaatcttttcgtgtccaagtcatctttgagaaacccgcacaggacaacatacaacatgttgaggtggaaaaacggatgaacaagaatatctcagttattggaatgccgatggatttaggacaagcacgacgcggagtggacatgggcccgagcgccatccgctacgcgcatctcattgaacggttatctgacatggggtatgcggtggaagacttaggcgacatccccgtcaatcgtgaaaaactcaaaaatgatgaagagctgaaaaatttgaactctgtgctctcggggaacgagcagctcgcccaaaaggtggacagcgtcattgagaatgagcggttccctctcgtcctgggcggcgatcacagcatcgcgatcggaacgctgacaggaacggcaaagcactataaacagctcggcgtcatctggtacgacgcgcatggcgacttaaacaccctggaaacatcgccgtcaggcaatattcacggaatgccgctggccgtcagccttggcgtcgggcacgacacgctggtgaacctgggcgggtatgctccgaaaatcaagccggagaacgtcgtcatcatcggcgcgagatcgcttgatgaaggcgagcgtgaatacattaaggaaacaggcatgaaggtctatacgatgcatgagattgaccgcctcggcatgacaaaggtcattgaagagacgattgactacttgtcagactgtgacggcgttcacctcagccttgacctcgacggccttgatccgagcgacgcgcccggcgtaggcacgcctgtcgtcggcggcatcagctaccgtgaaagccacttggcaatggaaatgctgtatgatgccgacatcatcacttcagctgaatttgtcgaagtcaacccgatcctcgatcacaaaaacaaaaccggcaaaacagcggtcgagctggtggaatctttgttgggaaaaaaactattataaaatatacgcctccgcacttgcgggggttttttttgttgccacgaggaaactagcgggctgtcaccctctttttagacctgtaaatatgatatatttattacacaaaatgggaaagggaggtgtcctgacagatggctgaagtgatggcccacgaaacagttgcgaaaaaaatcagtgactggtatgaggaaatcaaaaagcacaacactgaatcggctgaggcgttaagagaacaactgcttacggatctgcaaaatatgacacaaaatcaaacggtgctcctttattttaatttaattgattcccgctataagcttttgatggaagagtatgagaaaacagacggcattttaaaaacgatccagctgaacgccgataaagaaaaaacagaccagatgattcaatactattattatttcttttccggaatgcacgagttttaccgtaaacggtttatgaacgccattaatttttaccggattgctgaaagcaggcttcggcacataccgaatgagattgaaagagccgagtttaattatcaagtggcgattgcctactatgaaatccgccaaaactactttgcgatgaaccatgcggaaaaagcgttggagatctacaaagccaatgaaatgtacgcggtcagagaagcacagtgtttaatggtgatcggctgtaacagaatggacttgtttcactaccagaaagccgaagagctcctgcagacggcggttcatcaagccgccaaagcgggcgatccgcatattgaggcgctcgcccactttaacgcaggcatttgctatgaaagacaggaaaagcttgaggaggcgcgggtcgagtttgaaacggctctcgatcaaaaggagcatttgcaatcagcatattcggtgcggagtctgtacatgctggccagagtgttattgaaacaggaacagatggatgagggccggttttggctgcataaagcgctgaatgccgctgaagaaaaaaacgagcccgtatacacccaaaagctgcgcatcttacagcatgtctttattgaccgcaatgaagaagcgcttgaatcagctttcgccgagttaagaaggaaagagctgtggagtgacgtttccgatttgtcgtatcaggccgcggcgcattttaaaaaacaggagaattacaaactggcggcgaagtattttcaggaatcaattgatgccaatgaccaaattttgagattaacggaggggattcgtaatgaaaacatgtaaattcattgtactctcagcagccttggcaagtctcatttcgattggattatttgcgcaaactggttcaacggcacaagccgaacaaatcataaaaccggcggaaaacggagccttcggataatacttcatgataccgctttcaatccgtgttttgtaaggagtgattcaatggctatcacgctgcagccgatgacaggacaagaatttcagtcctatctcgcccattcaaccaagcattacgctgaagaaaaggtaaaagcgggaacgtggctgcctgacgaagcgccggagttagcgaagctggcgtttgaagacctgcttcctgacggcttggagacggccgatcactatttatggacgctgacattggacggaaaggaaaatgccggctggctgtggctgcacgccgatccggaccacccgcagcaggacgcgtttatttatgatttcggccttcatccgcctttccgcggcaaaggctatgcaaaagaggcactcgcaaggctggaggacaaagccaaagacctgggtgtccgcaagatttctctccatgtgttcgctcataacgaaacggcgcggaagctgtatgagaagacgggatttctggagacggatgtcatcatgagcaaaaagctgtcgtgaaaaggggcccgcacgctgggcctcttttgttattcatctaacaatgtcatcatgtgttccggataacgctcgccggccgcggtgccgatcggaaacatctcatccaatcgtgccttcacatcctcgggaagcacaatgtcgagagcggcgaggttctcttccaagtagtgtttcttttttgttcccgggatcggaatgagatcatcgccgtttgcgagaacccatgcgagcgcaagctgaggcgcggtgatattcatttcccgggcaatggcggtaagtttttggacgagccctatattcaccgccaaattgtctccctggaatctcggcgttcttcttctgtaatcatcggcatccagctgctcggtcgacgtcatctttccggaaagaaaacctctgccgagcggactgtaaggcacaaatgagatgccgagctcacggcaggcgggcagcacatgctcctccgcttccctgctccataaagaatattccgattgaagcgcggcaatcggatgaatgcggacggcgcgcctgatcgtttctgcggaagcctctgacaatccgataaatctcacctttccttcgtctatcagctccttcatggcgccgacggtttcttcaatcggcacccgcggatcaacccggtgcagataataaaggtcgatataatccgtcccaaggcgtttcagactggcgtcacacgcttttttcacataatcgggccgtccgttaatttcgataaactcaccctttttacttcggacataaccgaatttcgtcgcgaggcacagctcctttctgaatggggcgagcgctctgccgacaagttcttcattcgcacccaatccgtattgatcagccgtatcaaacacattcacgccgagatgaacggcatgatgcagtgtggaaatcgactcttcctcactctggctgccatagtattccgacatgcccatgcaccctaaccccattgcggaaacccgcatcgaaccgatcgttctgtccttcatatgtcctccccctttcttgtatgataaccggatttcctgatatttgaaaatgatttatgcatatgatttacatattgttataaaatttttaaaaatctgtaaattatatattttttcatcacaatttcgtcatataatgaaaatgtggaaaaattatactcaaagaaaagaggcgaagtcaatgtgtaaaaagctgttcaaagccgttctcccgtttgccctgtcattcaccatggttctgtcgttctccggtatgaatgtaaaagcgaaagaaacagaagcagcccgctacgcaaaagaaatcgcagaccttcagcagggcacgactcctcaagacgttctccaatccgccaaagagcttgccaaacagaagcacgtttcaacagaagcaattctcaagcagtttcatcaagaaatcacggcagacaaggtgcaaggaaatgtaatcgcttccaaagaagggctctctacaatgggcggatcatcaggcacaaaaaaacttccgaaaagcacaaaaggcaatatttattacacgaactcatacacggcttattacaaccacgggcatgtcggcatgtattcatccgctgataaaattgttgaatccgtgccgggagacggcgtccgccagattgcttataacggcagagaagtcgaagacaattcaatcgttcagaccgtgaaagtcactgatgcccaaaaacaagccgccgctgactgggccgtatcaagagtgggtgatgagtactccttcaacttcgtcaataacagaaatacgggccatgaaggcgccaaaaactgctcaaaactgctgtggtcggcattccttttaaaagccgggattgatatcgactctaacggcggcttaggcgtatatccgcgcgacatcacaagctcgtcctacacaaccacgattctgaccattcactaaggagaataacgtgaaaaaaatcatctggatacccttagtgatcatcgccgccgcagcggtcttatgcttcttctattttcgcacggaagatcctgcggaggtcgcgagaaacacattaaatgaccctgattttctgaaagataaagaggcgctgctgtatttctccactgccgctgaccaagacacgttcggcggcggaaaaagctacgccctcttcgccgatgaaaaagggcggctctcttcttatcaaatgaaggggcttgagctcggatcggccaaagtgcatgacgaaagcgtgctgctggaggacaaaaaaggaatctacaccgttcagggcggccttcacacgtataaaagagcgtaccagcatacgggagacagcgcgggatatatcgagcgggcgaaaggcttttacacgctgtataattcgggctacgacaagagcggcggcagctatcgctcagagctgtaccgccagattgacggcaggtggaagcaagacgtcattccgcactacatccgcgcttcaggcttttttaaagatcatcttttcgcgctcacgccgacagatgacgaaaaaggctatcacatccaagacattcaggccgataaagagaagctccatacaacatcaatcgcgacatggacgtataaagaaggcacgtctgtcgaatcccagctcgccgcggacgacagcgccatctgctttgtcaccagaggggaaaaagccgatcacatctatcaaatggtgaaagtcatgaaacacagcggcgctatcaaaacatatgacatcgccacttataaaaatgacgaacagacgatctatgactccatgccgttcagcttcaaaaaaagctttttcatggagcagcgcagcttctatttcgttgacggcttcggaaccgtctaccgcatcaaccctgagaccggaaaaagcaaaaaggccttcatcctccccgcatcacgaatgaaagccgacttcaaggagctgacccatcaaaacggaaagctgtatctgttcacatacagctacaaaaagcccgccaaaatcgaatccttcgacctgaaaacgggcaaaaagctgaacgatctggccattccaaacctgcaagacatcgtcacgccgaaaagccatcttaagctgtacgatgtgcaggtgatgggtgggttttgaagagtataaacatttcggaagagcttgccgcttttggtaagctttttataatgaaacgttactgcaagaaagaaggggttcatttgaaatcattcagtatcttcttattgttgtccgtcatttgtataaccattgtttttgtcataatgaatatgttgattggataccctgaggtgagtaacggggcattgattatgattgtatatatcgttgtgaccctcatgataaggcaatataacaagagaaaagccgaccgaacatagagatagaggaatttaggagggagccgatgaagaaaaagcttgccgcggtgaccgtcacccgtaataaccaactcttttttaaacggcggaaggctggactggatagatgtatgctctacactgctggcgtatctattaggaattctgttcgtccttcgcttagaaaaaagagaaaacacgtaaagagccggatgctgaaaacaccggctctttttgcgcgtgatttgccgaattgtggataaaactcagcccgaagcactactaacatgtgtataaataggttatattgaaaagagaacaattgccgcgcgcaaaagaaaaccggaggacgtaactatgaaaaccgcttattattcttgtgaagaacatatcgaaaccgtgctggacatgtacatagatgatcatgagcttccgcccgaaatcagaaaaatcgaacatactaacagtttatccacagcctgtgaattatgtggggacactgcaacatatctagtagggaacgaatgatcctacacaaaatacagaaaagatatccacaattgtggacaatatatatgaataacttgtttctaaagtggggatgacctgtgaatatcaatattgtgaccatcggaaaactaaaagaaaaatacctcaagcaaggcattgaagaatacaaaaaacgactctcagcctacgcaaaaatcgacatcatcgaactcccggacgaaaaagctccggaaaacctgagcgaccaagacatgaaaatcgtcaaagacaaagaaggcgaacgcatcctggccaaaatcagcccggacacccacgtcatcgccctcgccatcgaaggaaaaatgaaaacatccgaagaactggccgatacaatagataagctggcgacatatggaaaaagcaaaatcaccttcgtcatcggcggctcactcggcctaagcgacgccgtcatgaagcgcgcagacgacaaactgtcattctcaaaaatgacgtttcctcatcagctcatgcgtctgattttagtggagcaggtttatcgggcttttcggattaatcgtggggagccttatcataagtgagtggggtttttaaaagattccttttttattataggtattaatggaaagtggagttatgataaaaaacatacatacccataaatgtaatgaaataatatgaggggagttgaagtatatcaatggcacaatctttagaaagtaaaaactgtgagtgtgaagtttgtaaaaataatcatgaatttattcttcccagagatattattgaagcagttcaaaatcgaaatctagtaatttttgcaggagcaggagtaagtactgaatccagaagtgtgtataactatacactatatgaggaaataaaagatttattaaatttagacaaaggtgcaaatttgtcattttctgaattaatgagtcaattttgtaagcaaccaaatggacgtgcaaagctcctaagaaaaattaaagatagacttgattatgtaggttctttcccagaactagaaagaagagcttcgaaattccataatgagctttcaacaatacatcaaattacagaaataattactacgaattgggacgacttgtttgaaagaaaatgtggagctgtacctattgttacagttcaagattttgcattttggaataatccaggaagaaaggttttgaaaatccatggttcaataaataactatgggacagttatagcgactaaggaagattatgataaatgctatcaatctttaaatagtggaattattggaagctcgttaaagactatgcttgctacaaaatgtgttgtctttataggttattcatttggagacgaggattttaataagattcattactctttaatagaagaaatgaaggattttcttccacatgcatatatagttaccttagataaaaaagctgaagaaaaatttagcaatataaatattacacctgttataacagatgcaacatttttcataaaggtattaaaagaacatttaatacatttgaatttaatagtacctgatgaaaactttgaagatatatatgatgttttagagttggtccaagaggaacatactagaatttcatcttcatttaacataaaagaaaatcctcaagtaattttaaccttatgttatcaagatggtcttattcactcgtttgaaagaattttagcaatgaggaagacaggtgattattcaaaccctcaacaagtaaggataataataaataactatgaaaatataaaacaacaaaaatataataaaggtgtttatcatgatgtggcttatattgatggttatatcactggattaatatacttcttgtataacgaagaattggattgcctaccttgttattatgtgtttggtcatgaggaggatatttttgattttgaagagtttctagaaattatagtaaattcagaaattatacatcctgaatcttataaatatgctttgaatattgccaataaaattgataataaaaacggagatactgtatttcatcacacaccctttttataaaaaatttttatatggaggctttttaaagtgagtgaagttataccaagagagatagtttttgagaaactatttaatgcatttaactatggaaatttagggatgttcattggagcggggttttctaaggctgctattggtgatgattttccaccagctttaggttggtttgaattaattaaagaagcaagtggagaatttgagatagaattcccgaacgatgaagaattaattggtgtttcattacctgagttagcaactttgatttgtaaaaggttagcgattaagcgaagtatcgattatgttgaagctaaacgtatatttaaaaaagaaatttgtaatttatctaactggcttccgagtgaagaaaggaccttagagtttagagaaatctttgatatcttaagcccttcatggatagttaccacaaactacgatttagttcttgaaactattcttacggggaagagtaagagtcttagtccgatgaattatttatctgctcctaaaagtattgttcccatttatcatctacatggaactagattagattctgaatcaattattattactcaggaagattatataccgctttttagacccaatgaatataggcaggctaaattagcaatgacgataagagaatctactaccttaattctgggttatgggttaggggatgtaaatgttttgtcagcagttgattggtctaaaaatatttacacagaagaaaacgaatacccttatgaaatcatacaagctctttggacatcctcaccaaaagaggaagcctacagagatgaaaatggaaatgtaatcattgaaataagtgacttagaaaagtttttaaatgagttgattgtctttattgttgcaaaacaagaagattatgataataaattagctcaattaaataagctgataggtaagttaaaaggagggaatgaagagttcgtacaatcctttatagacaatagggaggtcagattaaaattaattgatgttttatcaagatttgaacaccatatgatttctccatatatacagttcctcacagtttgtataagtaaggtttgggaaaaaacttctgaaaatggagcatttaaaatgtatgataaatatttaactataattttagacattgtagttaattatgattacagaaaaatgtcaccaaggctatttcagctaactgcacaatcgttagatagggttctaaactatgtaagttcaagtatatctaggatgttatacggacatagttggtcggccacagaatcatggcacatcagaaagaaagatgttcctcaagaaatgatacatcaattgtatcattattctaagcaacatattcttactaacctaaatcgacaattaaaggaacttgttgcagaagatgatagataacctcatttagatacatcacggaaaactttaacagaagtgagcgaagttttataagacaaatatccttttgattacaaactaatctaaaaggatatttgtttaggtagaaattataatgtctactatgttaaagaaagtgatgaaaattctcgaaaaatgtaaaattaatgatataaagttgatgaaatggatcagcctcattaaatccaaacagtaccacttgttcgaaagacttctagttgaaatctaattttgtccatgaaaaactctgcatttttaaaatgaaatacacaaatgcaacttataattcaagttttctatatatggatgatgatgggggatagtatgaacggaaggaaagacatattaagtgcttggattacgatagagcaactatcagaaggttctattaataaaaaagataaagcgctaaagcctttacatacggtggagaaggactggaataagttttttttagactttttaagtaaacaaaaagaacagcaaaaggtatcagataagatctttaagaagtcgggattagtattatattttgatatattcaattttcaagagattgttgacatattgagggagaaatataagatcgctaagaactacgaagaagttagtaactctgacaaattcaccttctctgtatattttgataaccagttaaattttatagcagaaaaattgttctatacgatgagcggttatatccgccgacatggcgatttaccgaaagatattttaaaagttgaaaactcatttagagaagacttgaacaggaaatttgatgaggattttaataccgcaatttctgaactcttacaaaattataatgttaatacagaaaatttccgctatgcatttgtgaaaaacttggataatggagatgtgaatctacattcgttctttgttggagatctgaacaaagcaaagacaatcactaataaaaatttggatagatattttaatggcttttctggatacagaaaaaatttagatggtaaaaaagaatcaactcattttaattcacatattttcgagatgattttgcaacctaaattttatccgtcgggacgtttcccaagtaatcctgattttgcgctttcattcatgcaacaggttgcggtaaatcttgctttacatgatgaaaatgatattcgtagtgtcaatggaccgccaggaacagggaaaacaacactgttaaaagatattttcgctgatttagtagtgcaacaggcagcggaaatctcacagctgtctgataaaaatattcaaggtagtctagtttattggcagagtgctaaacttggtgttttaccgcattccatttcagataagaatattattgtagcaagttcaaacaatggggcagtccaaaacattgttaaggagctaccaaagaaagagaagattgctgatgattttcaaaagcaactagaggaagcgaattattttaaagatatttctaattctaaattaaccggtgaaggtttcggaaaaaatcgcaagataaaaagtgagcttttaaatgaggataattggggtacattttcgttggaaggcggagcatcatcaaacattaacaagttacttttaactatcgaagtaattgaaaaggatttaggagaaaattatgaagcgaatacagatgtaagtgtatatcaagaattctcacgtctctatgatgaattaaaaactgaaagagaaaaaattcaagaatatagcgagaaaatgtattctcttcaaaaatttaaaaccaagcataaggagcaaaccattgcttttgaacaagaagtaacagagaaacgagcaaatttgatttcacaggaggaagaagcacagcgtgaacttgaaaggctgggacaagaaagcgtaaatctccaaaaaaagttatcggattgttccattgaaatcaaaaatttgaatgatttacaagctcaagctgaacgaaattatgatgtagttacttcacaaaagccaagttttttatggttccagaaaatatttaataaatcaaaagttgagctgtatttcaaaaatctcaataatacgaatgcctatttaaatcatctttctcaacaaaagactaaattgttaaatgagcgcatgaaattcgaaaatgcactaaaggtaaatgctgttaaaatcgaatatactcggcaacaaattcaggacataaaagctgatttcgaacaatggatgactactcaacaaaatgattttaagaaattggaacaagaaattgcgttattggaaaaactcaaatttcaaagtggaatagaagaactagatttctcactatcatatgatgaacttcaaaagtctaatccatggtttaccaagcgctttcgtattttacaatcagaattatttatttcagccttaaaggttagaaagcaattcctgtatgtaaacagaaagaatttgagagcggcaagaattatttggaataaacagtccgaatacattggaaaagagaatggatatcagttaatttcagaatcatggcaatggttgaatttcgctatccctgttgtcagtactacctttgccagctttggcaggatgtttaaaaaccttaatgaaaactcaataggtaacctattcatagatgaggcaggtcaagcactaccgcaggcaagtgttggcgcaatttttagaagtaaaaaggttatggtggttggggacccatcacaaataaaaccagtattgacgttagattcaaatgtcctgacattgattggaagatattataaagttgatgaaaaatttgtctctgctgatgcttctactcaaacgattgtggatgccgcaagtcagtatggttttcaaaaaaatgaggatgaatggattggcataccactttgggtgcacagacgttcaaattatccgatgtttacgatttcaaatgaaatctcgtatgatgggttgatggtacaaggtaaatcagaagatgagtcacaaggaaaatcacaatggtatgattcaaccggaaaagcaaatgacaaatttgttaaagaacaagctgacttactgaaaagtctgattgataagcgtttgcaggaaaatccagacttagctgaagaaatctatgttatatctccatttagaaatgtggcttataaacttgcacaagttttagatgaaattaactttacgaaacacgaaaatgggaaaacaacaaatattggaactgtccatacttttcaaggaaaagaagcaaaaattgtctattttgttcttggagcggacactaatagcagtggggcagcaagatgggctgtttctgatccaaatatgatgaatgttgcagctacacgagctaaagaagaattttatgttattggcgataagaaattgtatgcctcacttgggagtgaagtggcaaataaaacgatttcgattattgaagactataacaggtaatcagcggtagtattctagtgaaatgtaactggccttaagtccttaaaatatcctttttattgtgatgtagaaaagttcagagaaacgtattgtagtcatctgccaaattaaaatgtaatggaaatatcatttttaatactaaccaagaatagaataaactctattgttgaaccgctttaaatcataaaggtaaacatacatttttaataatcttgaatccgatcattactgtattactgtttaagcttcattttaagattaaataggattattttctcgctgaaactaaacttccgctcaaacatagtgttcaaaacctaagcttcctttacctgctctcaaggtacaatagagaataatagcctggtttctgcttatagaattcatttttatttcctacacatggtaaaagaagcaacctactgttgcttctctttcaccatctttataaagagaaagaagacaatgaatacaataaaataattcaatggattcttaacgatgtttatctccagggaaatctgtaagagtatccagagaatgaagatggctagtattgaaggaatgatgattttgtacatgtcgaccaccttccatagttagtaagagaaaggggcgcgggcccctttttcttcatggttaaaagcaagatgcggcagctcctgtcattgcaccgccaacagcgccggtaattgctccaacggcacccgctcctactgttccgatgccgggtattgtgactgttcctacagcagctcctgcgagacccagtgtgccgcctccagttaccgcaccgccgccagtacctaaaatacatttcccgactgattgggtgctgattgaaccgctcgtttttccagcgtctttgttcatgactttgactaaaacgccatttttaattttttcatatttcagtgtaacgggttcaccatttttgtcagtagagcttttcggaagagcctgctcctcgcccgttatgttgtcttttagggttgcattgcctttagcgtcaatatgaacatctgcatgattgaacgtcatcttcagctcactgtcgttgaggttttcaactttgtatgtagcttgggattctgcggcagccgcagaatggggtaaaaccgggagggcaaaggcacctgctaggaataccaaggctgccagtttcactgcggttagcttcattttgctttgcataattgatcctcctcctttggttgccatactaacaaaggcattctgcttcttaaacccttaccatataaaatgataaaaaattcacccaatttcatcacattaaccaacaaggtttgtatgtttcccttcgaaagtcataggagagcagggttcatatctgatgcgaagttatcaaggagggaagaaaccagaagagcccagagaagcacctttattgcgacaacagcttctttcgctttttccatacaacagtataaatccctttccgtcacggaaacctagtggaaaaggtttctgaaaggagggggcgtatgatgaaaggtgaaaaaattcaaaacaaaacatctttggtttggaagatggcgattgcctctgcggtttcttgggaagcggcaaaactggcgggctctgatcacccgtatttagcgccgctatctgttatcttatgtttgcagccaacgatagatcagtcgattcgcttttcttttcatcgtattgcgggaactgcgattgggatcatgttaacgtcctatcttgtcagtcacttgccaatgaatggctggatgctggggctgttcctgttaggcgggacctatattgcaaagtggttacgaatagatgtaacggttctgcatcaggtagcgctcaccattttattggtctttacgtttgaacggaactctaaagattatgcattcgaccgaataatcgatacggtgatcggcgtcatcatcgccattctggttcacatgttcctttttccgccggactacacaaaaaaggcagcggactcttttcaaacattggctcgtcagctttccggcacactttcagacctttccaaatgggttcaatcagagtggggacaaggaaaagggaaccttatggaatataaaatgaacaatcttctgcaggagctgcatacggcaaaagagatgctgcaaacagcctctgacagcttaaaattcaaccccgtcagaaaacacatcatttcaagctatcaaatagagatgcaaaagttgaacgccggatttgagtatctatcaaatatagtgaaaacgttaaaagaatgggaaacagagggggagttatctgccagtgacaaaagggagctggggaatgatttacaagtgttaagtgaatactttgcgggttttaaaggaatacagcagggtgaaacaggcaactggaaacagaaggaacagagcgtgttgttggaatctctccgttccgacatgctgtcgcacccgccgcccggtcataaggtctataaagactctttttttttagaaacgaagaaattgctgaagcgtttgtaatgttttccggaaaaaaagaatacggatatacagatgcagatatgatcaggtaaaagcgggggacatgaaatggatgatatacaccggattttggatgtcatcgccaattctaaaaaagctaaggtactggctaccatcattaaaacagaggggtccgcttataagaaagaaggggcttcgatgctgattttaggggataaaacaagagtcggaatgttatccgccggttgtctggaagaagacctcgttgaacggtcggaacaggtctggactgcaggagagccgttgattgtccgctttgatatgagctcggaagacgatttatcctggggacagggcgttggctgtaatggtgttttgacggttttacttgagcctgtaaaaggggaattggaacgaaatctgataacagtcaagacatgcttagatgaaaaaaagtctgtgacccgaatgaaacgattcactaaaacgttagagccgaaggaagatctgtatatagctgaagacggcagcgtgtttggaaccggggatgttatggaacaaggccgtattcaaaaactgagacagacggaaaagggaatcaaaagggatgaacatacctctgatttattttttatccatcagatggtgccaaaaccttgtttatatgtcttcggagcaggggaagatgcgaagccgttagtttcgttggcagctcgtgcgggttttcatgtgacggtgattgactggcgccccgctttatgtcatcacggccattttcctgaagccggacgtttgattacaggagcaccggaagaagtcatggaaggtctgagcatgacaaaaagggattttgttgtcattatgacgcacagctttcaaaaagatcagatcattttacatacatttaaaaataagaatgtattttataaaggcgtattaggccccagaaggcgtacggagcggcttttaggcggggctgagattccggaagatatacattcccctatcggacttcccatcggggcacaaggccctgaggagattgctgtaagtattgtcggcgagatgattcaaaaaatgcgaaaacaaaggtctcgcttatgaaaacagcagccatttacctggcagccggtacaagcagacgcatggggacggataagcgcagtttagttctcaatggcgtctctctgggaagtatggcacttaaaaatgccttgttatctgaattagatcatattttcgttattacgagaaagggagattcactgcattggctttcggatgttttctttttagatcccatatcaaataagtggagtcaggcagaatgtgagcaagcgggtaaaggccaaggccattctatacaatgcggtgtgaaaaaagcggcagagtacgaggctgacgccgttatcattctccttgcagatcagccgtttgtcaccgcagatatcatcaatacgttaattgattcctatcaaaaggagcgccgttattcatttatcgccgctgaaaatcatcatcttcctatgccccccattttattctccaatcaatgttttccggtattgcatcagttaaagggagaccagggcgcccggcatgtcatccgtgaaagtatgatcaatacgggaaaaatgatcagctttcaagaccctttgcttttttatgacgtcgatacagctgaagattatacgctgctgctgaataaattcggggagtgaatgagttggagtatatcgggaagagtgtcattcggaaagaggcccttgaaaaagtgacgggtaaagcgaaatatacggatgattttcaagaaacaggcacattacacgcaaaaatgctgatcagtccatatgctcatgccgatattgtgtctatggacttttcagaagcttggaagattcccggagtgagagcgatattgggagatgaaccttttccgcttgcaggtgaggaaattaaagacaggtcgccgattgcttataaaagggtcagataccatggtgagccggttgctgttgttgttgcggaaaatccgattacagctaaaaaggcagcggatgccatcaaagtatcctataaacctcttcccgtcgtcaattcccccccgtgaggcctttcaaaaggatgcgccgctcgtccatgaacatgcggaccgctatgagaagacaaaaggtgtattcccggttccgaagacaaatatcgcaaacctggataaggttagaaaaggaaatattgaagacgggtttagggaaagtgatgtgacagcagaattccagatttcctttaacccttctgatcacgctgcgatggagacaagatgctcgatcgctgaaattcgcgcggatgaggagattatcattaccacatcctctcaagctccttttgccattaaaaaattaatgcagtggtattttggaatcgaacccggaaaggttatcgtcaaaacgcctttagtaggaggagcgtacgggggaaaagcagccgttcagttagaggtgattgcctatttggcatcaaaagcagtcggaggccggcccgtcaaattgtttaatacgagagaagaggatctgatcacatctcccgttcatgtaggattggatgctattgtcaaattaggggctacaaaggatggaatcttaaaggcggcagacattcagtttttatttgatggcggagcgtattctgataaaggagtggacatcagccgggctgcggtggttgattgtacgggtccgtacgctatcgaccatatacggtgtgattcatattgtatgtatacgaatcatccatatccaagtgcattcaggggctacagccatgctgaagtgttattcgcctttgagcggacgatggatgtattggcggaaaagctgaacatggacccgttagaactccgctataaaaatgccattcgccccggtgacaccacaccgactcaagttcttctcaattcaagcacggtcggaaatgtgccgaagtgcattgaaagattaaaggaattaatgaattgggacgagggacagcgaattgaaatcgatggccggaagatacgggcgaagggaatcagctgcatttggaaaacttcaacatttgatacaaatgcaacgtccggggttcttttaacctttaatcccgatggaagcattaatttgatgtcaggcgtagtggaaattggaacagggacaaaaacagtgctagcccaaatcctggcggaacgaatgaaaatggatataaacaaaattcatgtaaaaatgcttatagatacacaaacaacacccgagcattggaaaaccgtggggagcagagggacgttaatggccggaaatgccgtactgaatgcagcggaggaagccattcgaaagctgaaagacgtggcatcatgtgtgttgcgggttcctgtcgaggaattggaagtggccgacggaaaggtttattttatagatcatccttctgtacatgttgacataaaagacattgcttacggatatacgtttccaaatggaaataccattggcggccaaatcattgcgagcggcaattacacattaacccggatgacgaatttagaccgggaaacgggaagaggaaagccgggacccgaatgggctgtcggtgctcagggaattgaagttgagttggataaacgggattatacgtaccgaattacaaaagcctattctgttgtggatataggaactgtattgaatgaaaaagctgcaaggggtcaagtgatgggggggatgagtatgggaatcgcatttggaggaagagaaacctttgtatttgatccgtatggcagagtattaaatcctcagcttagaacataccgcccccttcactatggagagcagcctgaatatatcattgaatttgttgaaaccccgcatgtgatcgcgccttatggagcgcgcggcggcggggaacacggactgttggggatgccggcagcattgggaaattgcctttccgccgctttaggtgtccaattgaatcaacttcctctcattcccgaacaattatggaggacgcaagaggggtggaaagatgataccgtttgattttaattattttaaaccgaagaccattcaagaaacaaccggcctgtttcactcgcttgcggccgaaaagaaaacaccaatgtattattccggcggcacggaaattatcacgttaggaaggctgaatatcatctatacggatgcggtgatagatatgaacgcgcttccgggatttcaaaccatccgattttatgaacatgatctggtgatcggagcaggcgtgtcattaacgaaactggaggaagaaaatccatttccgctattaagtaaaacggtaagtgaaattgcggatcggacgactcgaaataaaatcagcctgggcggaaacatatgcgggggcatctattaccgtgaggccgtgctgccgttgctgatttctgatagtttgctagggattgcagggagagcggggattcattatcgccccataaataaagtatttaacagggaaatacagttgcgaaaaggagattttttatttcatgtcgttgtcgatcgagcgtatgttgacctgccatttgtcagtatcaaaagaagacagcagtggaatgtcgggtatccattggtgacagtctgtgcgctgaaaaaagatgatgagatcagaatggccttcagcggcgtatgtccatttccgtttcgttctgctgaaatggaggctgtgcttaacgataaaagctattcattagaagatagagtgcaccggtctttacagtatgtacccaaacccgttcttgatgacgcagaaggctcaagtgaataccgaatatttgtcttgcaaaatacaattttagatgccttatgggaattagaaggaggtccaaatgtctgatcctattacgttgaaagtaaatggcgaggaaagacagattacggtcagaccggctgatactttattatttgctcttcgtcttcgtctcggattaactggtgcaaagccgggctgcttaaatggggattgcggcgcctgtacggtattaacggacggggtgccgatgaaatcttgcttaatgcttgcggcagaaggggaaggaaaggacattacgacaattgaaggactgatcaatacaccgattcaaaaggcctttattgaaaaattcgcgtttcaatgcggttattgtacaccgggttttctcatgaattgtcatgctttagtgaatactgagccgaatgcaagtgatgacacgataaaaaattggctggagtccaatatttgcagatgcacgggttatagggagattgaagaagcggttaaatccgttttacatacagggaaagggacttcttagttcgcaaccgtaaaaaaagagcccagagaatcatccctgaactccatattcttcacttcatataccgatactcccgcagtttctccaaaatcgccacttctttcatcagttcttcaccgacgtttgtttctttcactttcttccgctccagctctttgtcgactaatcgtttcactgttaagacgtcggttccggtgttcagcacttcggccttggagttaaagtgtttatgggcgacgagctgcatgccgtaggagttgtataagagcgtgtagccggcgatgcctgttgtggattggtaggatttggagaagccgccgtcgatgacgatcatttttccgtttgccttgatcggatcttcgccttcgatttcttttaccggtgtatggccgttgatgatatggccgtgatccgggttaaggccgaattccttcaggatgtttcggcaggttgcttcgtcttcacgcaaatagtaatacgggtttttcttttctttatgcgtttccttctctttaatgaaataccgctcaaaggtggtcatggcgcgttttccgaagagggaggagtattcgcctgtccataagtaccacgtcatatctgtcgccagatcatcggtttcttccggatgggcaaacgcttcccgtaagaaccgttcaaatacatcgagcagctcacggcccgcataagctttatcctctatcatcatcgtttccatgctgccgttttcatcgacgggaatacagccgtgaatcagcaggttgccgttatattttagataaaggctgccttttttcatcataaaattcatatggcggcccagcttttcggagttctgaacagagaacagcagcttgtccatgacttctgcttcttcttctaacagctcgtcaggctgtttaggattcaccgtcgcaaagcaggtgttttccagttgatatgtttttccgttcagcgtgatttcattgcggtcataatcgatcttttccagtaacagccgttcctccatattaaagttcggccgtctcttaataatcgggctctcaagcttgaattggatcatcgcgatcgcctgatgaatttttgtgatttgtttaatctcatcttccggtctgttttcgtccgctttcggacggaaagacgggttatcatcgtaatacttttcggcaaggttcaatagcggtctcagattgatgccgtaaacgtcctcaataatgtccagattgtcatagcgggcacagatgcggataatgtttgccaggcatacttttgagccggaataagcgcctatccagagaacatcatgattcccccattgaatatccactgaatgatagttgatcagttcttccatgattttatccggctgtggtccgcggtcgtaaatatcgccgacaacatgcagatggtcgaccaccaatcgctgcgtgctgtaggcaagaccggtgatcagcttatcggcctgaccgagcgcaatgatctgttctatgatttcggaatagtattgttctttgttggcggcttgttctgttttgtacagcagctcttcagaaatataagcaaattgggcgggcagtgctttgcgcaatttggagcgggtgtacttggaagaacaataagaaacgagcttaatcatccgatgaatcgtttctttataccactcatttaatgcctctttcgtatcaaagtcatgtttgatcagctttagtttgtcctcagggtaatagaccaaagccgccagttcatcaatttgtctatcgtaaatgacgccgctgaaaatatcgcggatcttctcttttactcttcctgaaccgttccgcagcacgtgctggaatgcctgatactccccgtgcagatcactgacgaaatgctcggttcctttcggcaggttcagtatcgctttcagattaatgatttccgtgaccactttttcttcacaatcgtatttttgtgcgagcagatctaaatatttggtttccaatctcgtccatcccctttttatttacgagccattgtatggtaaggtgaatttaaagtatgacataaagtttacatcattagaccttatatgatagtaccgcaaatcgcctttttgagacaatgaaaacggaaaatacggcgcttcaggcatcgaaaattggaccgggataacgccgtgagctcatccccctattgacaatgaattcaacttccattaaaataaaaagttagctgataggtatttctatcataaactcaatacgtagcaggctatgattgctgtgggtcgcactacagcaggagcggcttctggagagaccgcggattttccgcggcgccgaagggttcacaatctcaggcaaaaggacagaagagtaccgaatatgtatttgtcatgctgttgattgtcagcggcgcagatataatttgatattcttatgaccatgagattggagggcatccaatctctttttttattggctttttttgctcgtcgttcactagagaggtaaggaggagtcagatgtggagcagcgagagctaaagagggacttatcgaatcggcacgtgcagctgatcgccattggcggcacgatcggcaccggattgtttttagggtctggtaaggcgattcagctggcgggtccttctatcatctttgcgtattttattgtaggtattgcgctttttttcgtcatgcgggcgctgggagaactgctgttatctaaagcgggctaccaatcattaacggatattgccgaggcgtatttagggccgcgtgcagcgtttgtcaccggctggacctattggttttgctggattatgacggctatggcggatgtgatcgccgtcggtgtgtatgtgaaatattggtttgatattccgcagtggattccggcacttatctgtttgctcattttattagggcttaatctgttaacggttaagatttttggagaattggagttttggttcgccttaattaaggtagtcacgattctcgcgttaattgtcatcggggtggttctgctggtgattgggttcaaaacgcataccggaacggtttcagcggcgaatctgtgggatcacggcggtttgtttccgaacggattttcaggctttttgctttcgttccagatggtgatcttcgcctatgtcggtgtggaattagtgggtgtgtcggcggcggaaacgtcaaatccgaaaaaaaatattccgtccgctatcaataaaattcctttacggattttatttttctacgtcggggcattgctcattcttttatgtattaacccgtggatgcagctgaatgcggcggaaagtccttttgtgaagaccttcagtctggtcggcatcccgttagccgcgggaatcattaattttgtcgtattaacgtctgccgcttctgcttgtaacagcgggatgttttcaacaagccggattttgtataacttaagcaaaacgaaacaagcgcctgcaagttttgcgaagctgaataaaaatcatgtgccgagccgcgcattatggatatcggttattgtgctgtcagctggcgctcttttaagcaaattgataccggaagcggcttttggcatcgtgacaaccatcagcgcgatttgtttcatttgggtgtggggcgtgattctggtctgtcatatcagatacaggaaaacccgtccggacttacacgcaagctcgtctttcaaggcgccgtttgcaccgtttatcaattacgccgtgctggcgctgtttgccgtcattctggtgattatgctgtttgcggatgcgacgcgcccggctttgctgctgacgccgctgtggtttattggactgtttcttatctatcgggcgagagggagaaagacagattgaattgcttcagacggtgtactgccatgcagtatgccgttttttgttttgattggaaagcgggaatatttgttagaattcaggctataatgattgtataatttaaaaaagtgtataattttaaatcaagcgaggtgataatatgaagtatgagaagttatctaagcttttttataaaatggatgctgattcatatgagaaagaatgtaaaaagagaacaagcagctatggcagttattcaacatcactaaacatacgggggttccgaaaaggccgacccacggacgattcatttgagctattttatgtgaatacacataaactcatgaagctgaataatgaagtgttgttaaacagttccaaaatttcatcccttatcagtcagctccccgaatttgccgtcaaaccgtattttgataaattaattattaatgaagcccagagtaataatgaaattgaaggaatccgcagtacaaaaaaagaattgaaagaggctcttaaagcgttagaacaatccgagccctcacataagcggtttgttggattgatgaaaacatatcaatttatagaccgaattccgtcgtttacaagcattcatgactttagggaattatatgacgagctggtcgcagatgaaatcggagcagaagatgcgccggatggtgagctattcagaaaaggctatgttgaagtgaacgatgggaacatgaccacccatatcggcgttaattctgaacagaagataacagaagcgcttgaggctttaattgcttatcttcatgatgaaacacatccccagctgtatcgttacatgacagctcattactactacgaatacattcatcctttttatgacggcaatggaagaacaggacgccttatcgttgggagttatttgtcccgatacttagaaaaatattcagccatcactttttcttacgcagttaataagaacaaagataagtattacaaggcattagaggaaattcccgcacctttaaaccggggagagctgactttttatttaatggatatgctggaattgcttctgtcaggacaaaaagggattattgaggatcttgaatttaatttaatgaaactgaaacgaattaggaactatattgatagcgatcaatgggctgattataaggatgaacgtgatatttttaatatcattatcacgattaatgtatttgtaaatgatcaggttacgctgtcggtgcaagatttaatggagctctcaaataaatcgagacataaaattaacagagtaatggattatttagaacagcaaggatttgttgagctggtaagcagaaggccaaaatcttataaaatcagcgaggattgtttagaggaaatactgccttcttaattagtatatttaaaaagccgccattcatatggcggcttttttacattaattccggatcaaataatcaaatgcgcctaaagcggcagttgcacctgatcccatggagataatgatttggttgtacgggccgtctgtgcagtcccctgcggcaaataggccgggaacgcttgtcgcgccgctcttatcgacgatgatttcgccgatgcggttgcgttcgacagtttcgtctaaccattctgtattaggcacgagaccgatttggacgaatacaccttgaagttcaacgtgtttttcttcgcctgtttcacggtcaacgaacgtaatgccgtttacgttttggtcgcctgtgatttctttcgtttgtgcatttttgtgcacagtgacgtttggcaggctgtagagacgtttttgcaggacttcgtctgctttcagttcaggcgcgaattccagcacagtcacgtgattgacgatacctgcaaggtcaatcgccgcttcgattccggagtttccgccgccgataaccgctacgtctttgccttcaaacaatggtccgtcacagtgcgggcagtaagcgacacctttgtttttgaactcttgctcaccaggtacgttgacattgcgccagcgggcacctgttgaaaggatcactgttttacttttcagtacagcgccgttttcaagttcaagttcgaagaggtcttttttctcaaggcgtttcgcacgctgaaggttcatgacgtcaatatcataatctttcacgtgctcttcaaggcttgcagcgagcttcggtccttcagtcgctttgacgctgatgaagttttcgatgctcatggtgtcgagtacctggccgccgaagcgttcagcgacgacaccggtgcggatgcctttacgcgccgtgtagatcgccgcgcttgcgccggcaggtccgccgccgacaacaagaacgtcaaacggctctttgtcggcaaactcagacgcatctgcgccgctgcccatttttgcgagaatctcttcgatggtcatacggccgcttccgaaagattcaccgtttaagaaaacagtcggaacagccataatgtttttgctttctacttcttctttgaatgccgcgccgtcaatcattgtatgtgtgatattcgggttgagcacgctcatcatgtttaatgcttggacgacatcagggcagttgtggcacgtcaggctgatataagactcaaagcggtattctccgctgatgttcttaatctggtcaatgaccttttgatcagccttaggcgctctgccgctgacttgaagcaatgccagcactaatgatgtaaattcgtggccgagaggaacaccggcgaatgtaacgcctgtgtcttctccggtacgattaacgctgaagctcggtgttctgtttaattcagttttttcaactgaaattttagatgacatggaagccagctcgtcaacgagagccagcatgtccttagaagtgtcatcgtcaccggcgcttactttgagaacaatgtcgttctcaattagctgcatgtattgatttaattgtgctttgatatttgcatcaagtaccaatggaatgcactccttagattttacctaccaaatcaaggctaggtgtaagtgtttcgccgccttcttcccatttagccgggcagacttcacctgggttttgacgaacgtattgagctgcttttactttgtttacaaggttgcttgcgtcacggccgataccgcctgcattgatttcaactgtttggatgacgccatcaggatcgatgatgaatgttccgcggtcagcaagaccagtttcttcgtcaagaacgtcgaagttgcgggagatcgtttgagatgggtcaccgatcattgcgtaagtgattttgccgattttttcagagctgtcatgccagcctttgtgtacgaagtgagtatctgtagaaacagagtatacttcaacacctaattctttcagtgcagcgtattgtccttgaagatcttcaagttcagtcgggcaaacgaaagagaaatccgctgggtagaagcagaaaacgctccattgacctttcaaatcttcgttagttacatcgatgaattcaccgtttttgaaagcttttgcttcgaatggcagtacttcttttccgattaaagacataatatcttcctcctgaaatgtgatttgaaatatattaaaaagacaaagcattcactttatctttcaataataattctaattatatatagattattaaataacatttattttttgtcaagctatatggggtattattttctgctttttttgctttagacgttcaaaaacacctggtataagcggtttggcgctgtttgtcctgtttagcgccgggcgaaagggggattctcaattggtgcattgaaacagtaggaatcaacccttctatatggcagtataaaccaaagggggtatgatcatgcaaataaataacattactttgtacagttgtgcgttggaggagacgaaacacttctatgaacgggtgttaggttttcctttaattgatgagtccggtgattcgtttacaatcaaggcgggagaaagtgagttggaattcaggcgcgccgattctcactctcatccgacgtatcatttcgcgtttaacattccgaataatcgttttgatgaggcgaaggcgtggataaaggataaagtcgtttttcaaacggaagatggggaggatgaggtgtatttctctcatattcaggcgcgttccttttatttcaaagatccgtccaacaatctggcggaattcatcgcgagagaaacatcgccgccaagcgcggaacgtttttcgattgagtccgttctgaatatcggtgaggtgaatctgacggctgccggggtcgtatcaaccgggagggagctgcagcgtttcggcattccggtgagaaagcatgcgccccttagggaagacgggtttcattttatgggtgattacaatgatggggcgtttttgcttttaggggcgagcggccgccgctggattttttctgatcagcatgcggagttccatccgctgtctgtcattgtgaacgggacggtccgcattgaggctgacggaaagggcggcattgacatcaggcgggcacagccgtcataaaaaagcccgggctcaaaaggcccggacttgaggtcattatttatagacaacacgggtgctgcacatgatgtcgtgcagcgtttttttctctccgaaggcgcccatgatgaatccgatataaagaatgagcttagatatgatatatgcgaaagcgcgtccgaaggcctggccgatggatatccgtccgccatcctcattgacgaccttaaggccgagcaatgcttttcccagagtcccctgcatctttgaggccgtgagcaggctgaaatataagatactgatcacaaaagagctcacaagaatcgggatgacgccgaacaccagaaaagagatgttaaactgattttcggtcatgaaggggtcagccgccgcaacgcctgccgcaaataaaaaagagaccataaattgaatgataaaaatcggaattcctatgatgatttgatcaatgacgtaagccagaaaccgaatccaaaatcctgccggtctttccatgtatctttttctctcccttgctttaatctggaatattatacgtaatcattccggattttgcaatggagcttaagcttctgcgagcagcctctttctccatgccaagcgtcccatgatcagtccgaaagccagaagggcaaacatgatgccgcaccacatcagctgatggactcccaaatgtgaaataaaccagccgcccgccgccgttccgatggtgatgccgaggttggaaaaggagacaaacaggctgttgccgaattcgggggcctcctttgcttccgcagtaagccatgtctggctgacaatgagcccgccggaatgaacggcgccccatacgaagacgaggacggccatcggcgcgaaagacgtcccaaacccgtatatgagcaagtaggcggctgtataaagaagcggaaacaggatgacggtctttttcatatttttatataacaaagcaccgaagacgaaattcccggctatcataatcactccgaagcccatcagcatgaagctgacccatgtaccattcatatgggacacccgtccgaggtactccgcaaaatagctgtagacagaaaacatggccgcaaagagacaggtgacggcagcgatattgagccacaaagccggtttgcgaaggatgccgagctggcttctgaaagacattttttctgtgaccggcatggatggcaaaaagagaagaatgcccgtgaacgcgatgagactgatgatagcgccgaataagaaggcggcttcaagggagagacgatccgccagataagacgtgaaaggcacgccgaacgcaaagccggcggtgatgcctgaaaagactttcgttactgcttttccggattggccggcggggacaagccgggccgcggccgcaagcgctacagaaaagaacaccgggtggcataaagccggaatgatccgaaacgccagcatgacactgaaatgcgccgtatacgcgtagaccgcatttgaaacggcaaacatcagcaccgccaaaagcagaatgtatttccggtttatgcctgaagcaagcaaggtcaaaaacggtcccgacacagcaacgatgaacgcgaaaatactgacaagccaccccgcttttgaagcagaaatatgaaatctgtccgccacttgcggaagaacgccgataatgcccatttcggtcgtgataattccgaaaacccctaatgccaaaaacagaatgaagatggaactgctttttttcattgttatgtatgcctccttttataactacatatatagataaatagatatgttataacaaaaaaagccctcctttcatggttatagctggtgctgaacatagtcagcaaaggctttaatttgtttttcattccttctgtaataggtccattttccgattcgttcggattccagcaggccggctttttgcatggtcagcaggtagctggagatgacggactgcgcaagccccgactttgcctgaatatcaccgacgcaaattccggtgcggaaactgagtccctgatcaagataaggtctttcatcaaaatggtcctccgggtgtttaagccacgtcataatatcacttcgtgttttgttagataacgctttatgaatcaatatcggttccataacgtttattatatctatttttctggatttgtaaattcgtttttgggaaaacattctcaaattaagtaaatatcgtgctaaaatataacatattatcagattaccggtaaaaaagccgggttattgtcaggaggatattcacatgaatcaaaagaaaaaaggtgcggttgcggtgaccttgctttccgctctgctgttttgtttattgccggtcctcgtctcgctttctccgcttgcggaaacggggccgaacgcgaatcgttttaattccgcgggcatgtgggccgccgtcggccagatccttgtgatatatgcggtcccgctcattttgtatattctcggtattcgtgtcatgaaaatcatcatggccgttttttgcggaatcgggcttatcatttgcgcggctgtcttgttggtgacgttattgaccgcaatttccttagggcaggagctgtctctttattacggccttttcgtttggtcaggcgcggcttttatcgtcaatgtggtgtggtatattgccgcgtttcgatcatccccgaagcatcagcaggctatgtgacatttgttctataaatctaccgaaaatacaaatatttcataggttaattatggtatgatcaaagtggtatagcagcttttaatagaaacgggaggaactgacattgaaaaaaaagacagcttcattgcgagtgaaaacattggcggccggcgctgcggttgctgcggctttatctgtgggagcggttactgatctgccgggggcaaaatggctgcatccggcggctgctcaagccgcggaaacggtatttaaacaaaatcatgcggcatccggtttcttggcgggacggtatgacgcgcaggcgatgtctccgacgatgttcaactggtcaagagaaagccggtttacaagcactgccgatggcgcattaaaatgggaaaagaatgttccggccaatcctcaaaacggtgcgggagccgcggttgatggggacggcaccgtatttattcaatcaaaagacgggaagctcacggcgtatcatccgaacggtactgtgaaatgggtgacggaaaaccttgggacgacctatacgctgactccggtgctcggaacaaacggtgtcatttatcttccttctcacgataaaaaactatatttcatcgacaaagaaaccggaaacattttaacatcggttccgctgagcggagcgccgagttccgatgcggctatcggctctgacggcacgctgtatgtgtcgacgctggataactatatctatgcgattaaaccgacgtcggcttcgacatggacgcaaaagtggaagtttaaaacaaacggcgtggtcggctccgctcccgtgttagcatcaaacggcactctgtatacggcaacgtacaataatatcttttacgcgatcaattccggaacgggccaagtgaaatggtcaaaaacgacgtccaacgggtttaaaggttatccggttattgatagagacggcaccgtttacgccggaaaccaggacggcaacttatacgcctatacatcaacgggtgctgtaaagtggacgttcccgttaaacggtttctccagctcttcattagcgatcgaccataacggcaatgtgtatatcggttccggaagcggcgagctgttttccatcagcaaaaccggcaatatgaactggtctttctatacggacgggcctgtgagaacggcgccgctgattgatgcggacggcaatgtgtacttcggttctgacgataaaaatgtctatgcggttgacgctgacggcaatgaaaaatggcgctatcaaacagacagcaatgtcatttcctccccggttctggctgaagacggcacgctctatgtcggcacttatacgaaactgctcgcattcggagcaaaaaaataataaaaaagaatccgcgtcgtctgcgcggattctttttttatttagaggcttgaataaatacgcctttttcatgagagaattctttaaagccgtacacaccgtgatatgaaccgatcccgctcgtattgacaccgccgaacggaaggttgacgtcagtgaaatgaacgacgacatcattgacagaagcattgccggacgtcgtatgctgcagcacataatcgatcagctcctgattatggctgaatacatacaaggcaagcggcttgtcccgttcagtgatgtaatcaacggcttcactgatatcttcgtaattcataatcggcagaatcggtgcgaagatttcttcctgcatgatcttcatatcaggcgtgacgtttgtcagcacggtcggagaaatcgtgcggtcatgcgcatcgaatacgccgccgaacgccgttttcgcccctttttcaatggcatcatcatacagggctttgacacggttaaagttgcggtcgttgacaatctgcgtgaatttattgcggtcaaccgtatgatcatcctccataaaacctgcattgacaatggtttgcaagagatctgtaaagatgctctgcacttctttcttcataaggagatagtcaggtgcgatacatgtttgccccgcattgacaaatttgccgacggcgatttttttcgccgcgtccatcaaatcatagccgctgtcgatgatcgtcgggctttttccgccaagctcaagcgtgacggacgacaagtgcttcgccgctgccgtcatgacgattttaccgacattcgtgcttccggtgaagaaaatgtggtcaaacggatggtcgagcagttctgtggcgacatcgacctcaccttcaaaaatggcgacttcttcttcgtgaaatgcctcgcgaataactgtcgcggcgatatggctcgtctccatcgtaaaatcagacagcttcacaatcgcgctgttgccggccgcaatggcagccgcaagcggagccatcgtcagcataaacggataattccatgggccgagaattaaggtgacgccttttggctcatacattaatacgccgtcagcgtcggggctgacggatgagccgacgcgtttcggcgccatccaggtgtcgagattgttcatattatctttaatcgccttgatcgttccctgcgtttccgctcttttcacctcatgataaggcttgcggacgtcccgtctgatcgcctcgatgatttcttcttcatgtgcggtgacggcatctaaaaagcgctgaagcttttctctgcgctgcccggctgttgaagcacgcagcgttttttgattttttttctgaagctcaaagacgcgtttgatgtctgcttttatatgctgatccatcggtcttcctcctctggttgcttttttgtttcttcagggcctattataatgtgatgtgtttttgcggcaaagacagcgtaaacacatctatacgttaccgtacaaattgcggtgatctgtctaatgaaaggagtgtctcttatgccggattctgtgacaactgacatcaaacaagcgcttttggccatgcttggagagcgggatatccgccgtgtgaccatgaaggacatcgccgaacggtcgcacgtgagccgggggacactgtacctttattacgaggataaatatgcgattttagaggatatagaagaagaaatgaaagacggactgagcgaagcgctttatgattcactgaagaataaagatgttcttcatttacatggcggatggcaaaaagtgcatccgaccctgtcttttgttgaccggcatcgggagttttttcaaacgatgatggaccgtcataaaatgccgtattttcactttcatgcttttttaaaagatgtgttccggcatgatgtgctgctgtcaccggtcaatgcggatttctcaccgactgaacaggatatgtacattcattaccgcgcgttatacacatatgccattgtgttgtactggctgaatgaggagcccggggcatccccggaagcgatcagcggacaggtgtgggatttgatttctcaaaaacggttttactggctgttcggccgccgggtaccggaacaagaagaaaaaaagcccgccgaccgccgggtgacccgaacgaggcaggccttgcaagaagccatgatcggcttaatggcggaaaaaaaagagtacgcggcgattacgatttccgatattgcccgtcaaagcaacctccgccgtgccactttttatgaccattacgccaacaaagaagcattgctgaaaacgatcatccatcaatcatgccgggatctgatcggattattgaccgtaaaaggagagcctgccgactgttccatggaagaagcggaagccgcgctcgtccgtctcttttccgcactgtcggacggcatgccgctcgtccattttctgagagagggttccggagtgcctgacgtcatcccggaaatgttcagagcgctgcaatcgttttatcttcatcagcccctgcacattcaggcggggaaaaagctctatgcatattatgtcgcgtccatgctcgtcggtctgattcaatatcgtcttcatgaaggaaaagaccacgcgccggacatgctggcccgggagtttctgcagtttttggatgtgaagaagtatcgggtgattttgctgtgaggatgatgaaaaagaactcagccgaaaacaggcgggttcttttttgctgttttctttgagaagtgccgatatgaagtgtccggctttatcccttataaaaaagaaaccttatgacgcctgatcagcattctgccgccaaacatgacaaatgtcatattcggggcatgatggctgctactacaaaagcgtctggcgccccgttatacttgggatcataatgaaaaagaagggacatgacatttatgatcaatcatgccgcaactcaaaaacaagcgtctttaaaaaagcaggttgccgcattttccggcgccgatacaaagcatagtgtcattcagcttttcaacacgtttgtgccgttctttgccctttggtttcttgcttacctcagccttgatgtctcctatcttctgaccctcgcctttactgttatagcagcgggatttttgacaagaatctttattattttccacgactgctgccatcaatcctttttcaaacaaaagaagctgaaccggctgttcgggtttatttcaggtgtgctgacactgtttccgttccttcaatggcaacgcagccactccattcatcatgcgacaagcagcaacttagataaacggggcaccggcgatatttggatgatgactgtcaaggaatacaacgaagcctcagcttggacaaaaatacgctacagaatttatcgcaatccgtttattatgtttattctcggaccgatttacgtatttctgattcaaaaccgttttaatgtaaaaggcgcccgccgcaaggagcgctggaacacctatttcacgaacgcggcgattgtcttattggctgctgcgacgtgcctgcttgtcggctgggaaaactttttgcttgttcagggtccgattttccttatttcggggtcaatcggcgtctggctcttttatgttcagcacacgtttgaggattcttattttgaagcagatgagcattgggattatgtgcaggccgcggtagaaggaagctccttttacaagcttccgaagcttttgcaatggctgacgggcaatatcggctaccatcatgtccaccacttaagcccgaaagtgccgaactacaagctggaagccgctcatgaggggcacgagcctttaaaaaacgtaccgaccattacgcttaaaacaagtcttgaatccatgaaattccgtttgtgggatgaggacgaaaagcaatttgtcacctttcgggaggcgcggaaaaaaccggcgccccatccggtgccgaaagaacctttaaagaaaaatgcctgatatggcgcgcggctctttctcttatcagaaagagccttctcttcatgcgtgaggatgcaatgaaggcggtgttttgataaagtgatggtagacacaagcagcagaaggtggaacaaagatgaagaagtattttaaatttcaaaaactgaacgggatttctccttatatatggatgatttttttcatcttgcctttttattttatttttaaaagctcttctacctttgtcatcgtggccggcatcattttcacacttgttttctttggcgcataccgcttcgcatttgttgcaaaaggctggccgctttacttatgggcgcttcttctgatcggcatttcgaccggctcagccatgctgttcagctatatttatttcgccttctttatcgcctacttcatcggccatatccgagacaaagttccattttacatcttatattacattcatatcatcagtgcggcggttgccgtcaacttcagccttgttctgaaaaaagagtggtttttgacacagattccgtttatcgtcattacactgatcagtgccatcctgctcccgctcagcattcgaagcagaaaggcacgggagcgccttgaagagaaattagaatatgcaaatgagcgaatcgccgatcttgtgaagctggaagaaaggcagcgcatcgcccgggatcttcacgatacacttggacaaaagctctccttaatcggactgaaaagcgacctcgcccgaaagctgatttacaaggaccctgaacaggcccgcactgagctgaaaagcgtgcagcagacggcccgcacctccttaaatgaggtcagaaaaatcgtctcatcgatgaaaggcatccgattgaaggatgagctcggcaatgttcggcaaattcttgaagcggcaggaattgaatttgtgtatgaagaaaaagaagcgccaaaacatatctctctgctgaacgaaaacatcgtcagcatgtgcataaaagaagccgtcaccaatgtcgtgaagcacagcggcgccaaagtatgccatatcaccattcagcagctttggaaagaggttgtcattacggtggaagatgacggcagctttcaatgcaaagaagaccgctttttttcaaaggggcacggcctgcttggaatgagggaacgtcttgaattcgcaaacggcagtttagccgtcgatacagccgccggaacaaagctgaccatgagaatcccgaatgattcaaaatcaaaagaaaaggatggtagcagatgatcaacatcttcattgccgaggatcagcaaatgctgctcggcgcactcggttcactgttgaatttagaagaggatatgacggttgtcggccaaggcacaagcggccaggatgccatcgatttcgtgggaaaacatgcgcccgacatttgtctgatggatatcgaaatgcccgggaaatcaggccttgaagcggcagaagaactcaaggacagcggtgtgaaaatcatcattttgacgacctttgcccgctccggctattttcagcgggcgctaaaagcaggcgtcagcgggtacatgctcaaggacagcccgagcgatgagctcgtcagcgccatccgcagcgtcatgaaaggaagacgcgtctacgcacctgaattaatggaggacatctatagtgaagagaacccgctgaccgaacgggaaaaagaggtgctcgagcttgtggcagacggaaaaaacacgaaagaaatcgcaaacgccctcagcattaaaagcggcacagtccgcaattacgtttcgatgatccttgataaattagaagtgaaaaatcgaattgaagccattacccgatcaaaggaaaagggctggtttaagtaacccgccctcagcttgttcagccagtgtttttgcactggcttgtttctttttcaccgtcactccgtctcttccttccacttcttatcaatcagcattttccccggccaagtgtatgccatgatgccgccgtctgcggtgatgtcttctcccgtgacgtaagagctgtcgtctgaagcgaggaagagcgcgacggctgccatttcttccggttttccgagccggccgagcggcgtgatccatttgttggcttcacggaacgcttcgcccatttcgtcttctgtcgtgcctgccaatttatcaatgagcggcgtttcaatcgtccccggcgataaggaattgacgcggattccgcttctggcgtaatcaatggccatcgctctcgtcaggttcgtgattccgccttttgcggcgttatagccggagcggtcaaggtctgcggcccggccggacatggaggaggtgttgatgatggagcctcctttttcgagcatgagcggaatcaggtatttgctgcacagaaatgtgccgcgcagatcgacggcgatgatccggtcaaacaggtcgaccgggtattcatggacttttccgccctcttggtcaacaccggcattgttaaacagaatatcaattgctccgtacttttgctgaatgctgtccgcaaaagactttacgttttcttcgtctgatacatcaaggtgaaaggcttctgcttctccgccgttttttctgatggcgctgacggtttcgttcagttcgctttcattgatgtcaccgcagatcacgcgggcgccttcatcggcgaaaacccgtgccgtcgcttgtccgatgcctgtcgcggcccctgtgatgattgcggttttgtctgttaatcttcccatattgcgattcctccttttttatatctgttcccgctgaatagggggataaacatatggaggtctatttctaaatacctattaaatatgttaatattatgtatatatatcattgggaggtttacatattttgaagatacagcataagaaggagatagcgttttattgttatgccattgttcctatgggatttgtgatttacaccgttatctctattctatttcaggacatcacatttcctctcactgtaagaaatgttctgcatgagtctttgcgaaacttgggatctcttatcttatttagtttgtttttctacccgtcatacatatggatgaagaaggaattcggccgccggaaagaagcagagaagagaggatgatcaacattctctcttttttattaataaaatgggtgaaatgaatccattaacatgttaaatttacaatatatgcatctgctaatgctagttgacaattgtcactgtatatgataaatagatgctgaaaagattttacataacatcaaagcataattaaaggagagatctgaagtgcggaaaaaaaagtttaaagcagaatccaagcgattgctggacatgatgattaactccatttacacgcagaaggaaatttttctccgcgagttaatttccaacgcgagcgatgcgattgacaaaatctattacaaggcgttaaccgatgattcattaacgtttgatcaagacaattactacataaaagtgacggcggacaaagaagcgagaacgctcaccgtcacagacaccggtatcgggatgacaaaagacgagcttgaacagcatctcggcacgattgcgaaaagcggttcactcgctttcaagcaagaaaatgactcgaaagacggccatgacattatcggccagttcggcgtcggattttatgcggcgtttatggtggctgataaagtcacggtgaaaagtaaagcgctcggcagtgacgaggcgtatgtgtgggagtcggaaggggctgccggctacacgatcgcgccgtgtgacaaggaaaccgtcggtacggaaatcaccttgaaaataaaagaaaacacagaagatgaaagctatgatgagtttttagaaaactaccgcatcaaagcgatcgtgaaaaagtactctgattttatccgctacccgatcaaaatggaagagacggtcaacaagccgaaagagggcagcgagaacgaatttgaagaagttcaggaagaacagacggtcaacagcatggtgccgatctggagaaaaaacaaaagcgagctgacggatgaggattacgaggctttttacgccgagaagcattacggttttgataaaccgctgacccatgtgcatatcagcgtcgatggagcggtgcgctacaattcgattttgtttattccggaaaacatgccgtttgactattatacgaaggaattcgaaaaaggattggagctgtattccaacggcgtgctgatcatgaacaaatgcgccgacctgctgccggatcatttcagctttgtaaaaggcatggtggattctgaggatctgtcgctgaacatttccagagagatgctgcagcacgaccgccagctgaagctgattgcgaaaaacatcaataaaaaaatcaaagccgagctgaagagcctgctgaagaacaaaagggaaaaatacgaatctttctatgaatctttcggcagacagctgaaattcggtgtctataatgatttcggcgcgaataaagacgtattaaaagatctgcttctcttctattcatctaaggagaaaaagctcgtcactctggacgaatatgtgtccagaatgcctgaggatcaaaaatatatctattacgcgtccggcgattcatatgagcggattgaaaagctgccgcaaactgaaatggtggcggacaaaggctacgagattttatatttcacggaagatattgatgaattcgcgatcaaaatgctgacaagctatgaggaaaaagagttcaaatccgtatccagcgccgacttaggcatcgacagtgacgaagatgaaaagcagactgaagccgaagagaacgaatataaagacctgttcgaaagcatgaaagagattcttgcggataaagtaaagaacgtcagagcatcgaaacgtttaaaatcccatccggtctgctttgcgacagacggcgaagtgacgatcgaaatggaaaaagtgttgaacgccatgcctgacagccagcaggtcaaagcggaaaaagtgctggaaatcaacccgaatcacgaagtgtttgagacgttaaagaacgctcacggacaagatcgggaaaagattgcattatacacaaaccttctctacaatcaggcgcttctgattgaagggctgccgatccatgatccggtcgagtttacgaatgacatctgcaaagtcatggtatgacgctaaaaaggaatcgcccggcgggggcgattcctttttttattacagtgtgcgctgtttaagaatttgattttgtttgctgcgcttctttaaggagaaccgttttttcaagtgcgtttcgatttcttctaaacttctgcccttcgtttcaggaacgatgtaagcggcgaagaagaaggatgagaggcaaatgactgagaatattccgaatacccagccgatgcccatggcgctcagcataagcgggaataccagtgaaacgatcaggttggttgccgacagaatcaatgtcgtaaatcctgttgcggctccgcgtgcgtttgacgggaacagctccggcatcaggacccacacaacgggaccccatgtcgcctgatagaaaacgatatagatgccgagaaacagcacggtcagccatgccgttgaagctgacaggccggccagaaggagaatggctgatagtgacgccaggctcaaggtaatgccgacacttccccacatcagcagttttttccggccgatccggtcaattaagatcatggcggtgatacacatgatgacgtttaagacaccgatgcccatcgtgccgagaacggacgccgaagtgccgagtccggcctttgtaaagatggtcggcgcatagtaaatcaccgtgttgataccgaccgcctgctggaagatggcgaggccgatcccgatcagcagcatagggcggatccatttggctttcagcaagccgagtgtagattcttttttctcggcttcaccttgtttcatttccgccaattcaacggcgatatcctctttgtcgtgagtcatttccatgacttgtctggcttccttctcacggccgcgtttgacgagccatctcggagattccggcataaacgcgattccgattaataaaagcgccgccggtactgcggcgagaccgaccatccagcgccaagcttcaaacggggtgaatatgtaattcacaatatatgcgagtaaaattccggttacaatcattaagttattcaatgtgccgagcgttccgcgtatttttgtcggcgccatctcagatagataaacgggaaccagcgccgttgagccgccgacggctaacccgagaatgacacgggagataatcagcatggtgacggtttgcgaagccgcacacgcaagcgcgccgataataaaaatgagtgaaaggacgaaaaccacttttctccggccccatcggtcagagcatgtcccgcttaaggcggacccgaaaatcgcaccgagcagcagcatgctgacgaccaatccttcggtcagcgtgtttaaaggaatatcattgttaataaataacaaagcccctgaaatcacaccggtgtcatagccgtaaagcagcccgcctaatgctccgaaaaagtaaatcaggtattttttggtgtttttcttcacagatgatcctcctcatcttttggaacgcataatagtttatttagataactatttcattccccgaagagaaaaatataaacataaaaaacacgccccttttaaaaggcgtgtttttttttctttcttaggaaaacagcttgtcgataaacgcgatttcttcagcagatagcgtaatggaggctgctttcatgttgtcttttaattgatccgcacgtttggcgcccggaatcaggatatcgatttcaggtctcgccaagtaccaggcaagcacgatatgcgccgtatcggcattgtgcttttcggcaattggtttgagctggttgacttttttgatgttttctttaaactgctccccttggaaatgcgcctggtcattgcgcaggtcgccttcagggaaggttgtgttctcgtcgtatttgccggccagcagtccggatacgagcgggaagtacggaatgaatgagatgccgtgttctgtcgtataagggaagaaagtcttttccgcctcacggttcagcaggttgtattctccttgaatcacgtcgactaagccgtctttattggcttctttcagctgctccaatgagaaattggatacgccgatggaacggatttttccttcttttttcagctcattcaatgcttgaacggcttcgtccttcggcgtgtgctcatccgggaaatggatgtagaataaatcaatgtaatcagtctgcaggcgtttcaggctgtcttcgaccgattgtttcaaaaaggccggtgagttgtcgaaaacaaagtcatcgccttcttttctgtgagcggcttttgtggcgatgaagacatcctcgcggttaaagtctttcagcacctcgccgattaattcttcagaacggcccacaccgtaaatataggcggtatctaacatggtaacgccgcttttaatcgcttcccggaccaattcttttcctgtttcttcattcagattcggatagagattgtgtccgccgaccgcatttgttcccaaaccgatcggaaatacctgtaggtcagttttgccgattgttactttgctcatgttttcgccccctgaaaaaattggatatcatagcgactgccggaaaaatacggcagcgttctctattaactataacgctatgccaagtgaatgtcgatttgatgctcttggcaatacttcgtatattcctcatcgagctgctgagaagtgacgatgctgtgaagccggtcgaaaggcgcgtatgtcaaaagcgtggatttgccgaatttggaatgatccgcgagcagatacacttcgttcgccttttcggaaattctctttttcacctcgtattccagtaagtcggaattcgtcaggccgtgggtgatcgttgtcccggtagcggacatgaacgccttgttaatgttgtatttattgagtgtgctcggatcatcaatgccgacaaacgaccttgtcttccgtttgtagttattgccgatgatgatcaggtcgatatttttcatggatgaagccgcgttaataatatcaaggctgttcgtcaaaaccgttacattcttatcgggatcaagcgtctccagcatcgatttggtcgtcgtgccggaatcaataaacacaagatcatgatcctcgataaatcgtgacgcatagcgggcgattttgattttttcatcctgatgttgaatggtgcggttttcaaaagggacgagcacagatttttcggctgacgtcacgccgccgtatacctttttgataacccctttttccgcaagcttattaatatcgcgtctgaccgtgtttttagagacgttgaatacctcgcacagctcatccagcgaagtggctccgtgtttgagaatgtattcttccatctcctgaatccgcatcagtttcataaaaaaactccttctagaattcttaaagtaattaaaatatataataaacaccagaagttaatcaatagttacttaacaaatgataaaaaagagggttcacaccgtacgattcgacacggttctccaagttcctgttttcccgttcaaaaaaagcatgataaaaataatgaaaaaattttgattttttagattgacttgaaggtttgttgggcttacaatgtaaccaagaaatgaccaaaatataacctataaaatcaaaagtgaaagatgtaaccgtttgcttttttccgtcacatgatcaacttttacatggaaagattgggagtcaccatcattttagcatttgtaagcgtttaattcatgtcttttatatgtaaaagatgaatatattcatccgttattacccagttgaacaggatgcttactatttaaggaggcaatgagaatggcagagatcagaaaactgaaaaactacatcaatggtgaatgggttgaaagtaagacagatcaatatgaagacgttgtcaatccggctacaaaagaagtgatgtgccaggttccgatttctacgcgggaggatgtggaatacgccgtccgctcagcgtcagaggcgtttcaaacatggtcaaagacggcagtgccgcgccgtgcgagaattctatttaactatcagcagcttctccagcagaacaaagaagagcttgcccgtctgatcactttggaaaacggtaaaaacacgacggaagcactcggtgaagtgggacgcggaattgaaaacgtcgaattcgcagcgggagcgccgtcactcatgatgggcgattcactcgcctccatcgcgacggatgtagaggcggcgaactaccgctatccgatcggggtggtcggcggtatcgcaccgttcaacttcccgatgatggtcccgtgctggatgttcccgatggcgatttcattaggaaacactttcattctgaagccgtctgagcgcacgccgctgttaacggaaaaactggcagagctgtttgaacaggccggtctgccgaagggcgtcttcaatgtcgtgcacggcgcgcatgacgtcgtaaacggcgttcttgaacatccggagattaaagccatctcattcgtcggttcaaaacctgtcggcgagtatgttttcaaaaaaggcagcgaacatttgaaacgcgtgcaggcgttaacgggcgcgaaaaaccatacgatcgtgttaaatgacgcccaccttgaagatacggtgacaaacattatcggcgcggcattcggttcggcaggagagcgctgcatggcatgcgcggttgtgacggttgaagagggaatcgccgatgagtttatggcgaaattacaggaaaaggtcgcagacatcaagatcggaaacggactggatgacggcgtgttcttaggcccggtcatccgcgaggacaacaaaaaacggacgcacagctatattgaaaaaggcatcgaagaaggagcgagacttctttgtgacgggcgtgaaaacgcaacggaagacggctatttcgtcggaccgacaatttttgacaacgtgacgacggatatgacgatctggaaagatgaaatctttgcgcccgttctgtcggtcatccgcgtgaaaaacttaaaagaagcggtggacatcgccaaccagtctgaatttgcgaacggcgcgtgtctgttcacttcaaatgcgaacgcgatccgctacttccgtgaaaatattgatgcgggaatgctcggcatcaaccttggcgtcccggcgccgatggcattcttcccgttctctggctggaagtcttctttcttcggcacattgcacgcaaacggaaaagacagcgtcgacttctatacacgtaaaaaagtcgtgacggcacgatacccgtctcctgacttcaattgatctgacagccggcccggacggctttgtgattccgtccgggttttcttttaccatcaattaaggaggaataaacatgagtcatttgctgcgcaaaccgcaggccgatgagatttctcaaggcgtgaacatcatacatgacgtcacttcagccaattcagacctcaaatacgtcggatttaaagtcgttgacctcactcccggttccgcatatacagaagatttgaaaaagacggagtgctgcatcgttgcggtaacgggaaaaatcaccgtcactgattatgatcagacatttgaaagcatcggcacccgtgaaagcgtatttgaaagaaaaccgacggacagcgtttatgtgtccaatgaccgctcttttggaatcacagcggtcagcggggcgagggtcgcgctgtgctattctccgtccgaacgccagcttccgacaaagctgattaaagcggaagacaacggtgtggaacatcgcggcaagctggcaaacaaacgaaccgttcataatattctccccgattcagatccatcggcaaacagccttctcgttgttgaagtttacacggacagcggcaactggtcgagctacccgcctcataaacatgaccaagacaatctgccggctgaatcctttttagaagaaacctattaccatgaaacggacccgccgcaggggtttgtcttccagcgtgtgtacacggacgaccgctcgattgacgagacgatgaccgcagaaaatgaaaacgttgtcatcgtcccggcgggctatcacccggttggtgttccggacgggtatacctcttactacctgaatgtaatggcgggaccgacacgaaaatggaagtttcataatgatccggcccatgaatggatcctgaaacgctaaccagtgaggagtggcagataacgatgaaatatacgtttaatgaagaaaaagagtttgatattgtcgcgatcggacgcgcgtgtattgatttgaacgcggcggaatacaaccggccgatggaagaaacgatgacgttttctaaatatgtcggcggctccccggcaaatattgcgatcggcagcgccaagctcggattaaaagcaggttttatcggcaaaatcccggatgaccagcacggcagattcatcgtttcctatatgcaggaaaagggcgttgatacgtcacaaatgaccgttgacagagaagggcgcaaagccgggctcgcttttacggaaattctcagtcccgaagagtgcagcattctgatgtaccgggatgacgtggcggatttgtatcttgagccgtccgaagtcaatgaaggctacatcgcaaacgcgaaaatgctgctcgtttcaggtacggcgcttgcgaaaagcccgtcgcgcgaagccgtcttaaaagcggtgcatatcgcaaaaaaacatgacgtaaaagtcgtgtttgagctcgactaccgtccgtatacatggcaatcggcagaagaaacagccgtgtactacacgctggcggcggaacaatccgatatcgtcatcggtacgcgtgacgaatttgacgtaatggaaaaccgcagcggcggagataacgatgaaaccgtccgctatttgtttgcccactccgctgatcttgtcgtcattaagcatggcgttgacggatcatacgcatacagcagatcgggagaagttttccgggcgcatgcctataaaacaaaggtgctgaagaccttcggagcgggtgattcctatgcgtcagccttcatctacggacttgtcagcggccgggatattgaaacggctttaaaatacgggagcgcttccgcttccatcgtcgtcagcagacacagctcctcagaagcaatgccggctgccggtgaaatcatcgaactgattgaagcgcagcacagtcttaacggtaaatagaacgtataaaaggtgggatcgtttgtgggtaatacaattcgcttaacgacagcacaagcgctgataaaattcttgaaccggcagtacattcatgttgacggaaaagaagagccgttcgttgagggcatcttcacgattttcggccatggaaatgtgttggggatcgggcaggcgcttgagcaggacgccgggcacctgaaagtctatcaaggcaaaaacgaacaaggcatggcgcatgccgcgatggcatacagcaagcagatgctgagaagaaaaatttacgcggtatcgacttcggtcggtccgggtgccgctaacttgacggctgccgcgggtacggcgctggccaatcatatcccggtgctgctgcttccggccgatacctttgcgacgaggcagcctgacccggtgcttcagcaggtggagcaggaatacagtgccgccgtcacgacaaacgatgcgttaaagcccgtgtcccgctattgggaccgcatcacccgccccgagcagctgatgagcagcttaatccgggcatttgaagtgatgacagatccggcaaaagcgggtccggcgaccatctgcatttctcaggatgtagagggagaagcatttgattttgatgaaagcttctttgaaaaacgcgttcattacattgaccggatgcagccgagcgagcgtgagctgaaaggcgccgcagagagaattaaggagagcagccgtcccgtcattttagtgggcggaggcgcgaagtactccggcgcgcgtgaggaattaatcgcgctttctgaaacatacggcattccgcttgtcgaaacgcaggccggcaagtcaacggttgaagctgatttcgccaacaatcttggcggcatgggcatcacgggcacactcgccgcaaacaaagccgcccgccaggctgatctgatcatcggtgtcggcacacggtacacggactttgcgacatcctcgaaaacggcgtttgattttgacaaagcaaaatttttgaatatcaatgtcagccgcatgcaggcttacaagcttgacgcgtttcaggtcgtagccgatgcgaaagtgacgctcggcaggctgcacggcttattagacggatataaaagtgcattcggcacggcgattaaagattggaaagatgaatggctggctgaacgggaccggctcggcaaggtcacttttacacgtgacgcgttcaaaccggaaattaaaaaccatttctcacaggacgtgttaaacgagtatgccgacgcgctcgagactgagctgccgcagacaacggcgctgttgaccatcaatgacacgattcctgaagacagcgtcgtcatcagctcggcggggtctcttccgggagatttgcagcggctgtggcattccaacgtcccgaatacgtaccacctcgagtacggctattcctgcatggggtatgaagtatcgggcacactcggcctcaagctggctcatcccgacaaagaagtctattctctcgtcggtgacggaagctttctgatgctgcactcagagctgattaccgcgcttcaatataacaaaaaaatcaatgtcctgctctttgacaactcgggattcggctgtatcaacaacctgcagatggatcacgggagcggcagttatttctgcgagttccgcaccgaggacaatcagattttaaacgttgattacgcgaaggtggcagagggctacggcgctaaaacttacagagccaatacggttgaagaactgaaagcggcgcttgaagatgcgaaaacgcaagatgtatccactttaattgaaatgaaggttctgccgaaaacgatgacggacggctatgacagctggtggcatgtcggcgtggcggaagtgtcagagcaggaaagcgttcagcgggcatacgaagcgaaagagacgaagctgaagtctgcgaagcagtactagaggggaggcatcacgatgggcaaacaagatattctgtggggcatcgctcctattgggtggcgcaatgacgatatgccggaaatcggagccgggaatacgctgcagcatttgttaagcgatattgttgtcgccggctttcaaggtacggaagtgggagggtttttccctgaaccctccgtcctcaataaggagctggctctccggaacttgcggattgcggggaaatggttcagcagctttatcatacaagacggtattgaaaaaacggctgaacaatttacagaacactgtgattatttgcagaaagtcggagcggatgtcgccaccgtttctgaacagacgtacagtgttcaaggcttggacattgatgtatttaagaaaaaaccgcacttctcagatgaagaatgggatacgctgtgccaaggcttgaaccgtctcgggaaaatcgctgacgaatacgggctggatctcacgtttcatcatcatctcggcacaggcgtccagacggcggaagaagttgaccggctgatggatggaacggacccgcggtatgtccatttactatatgataccggccatgcctatatctcggacggagactatatgacgattctcaacaagcatatggatcggatcagacacgttcatttcaaggacgcgcggtttgacattatggagcggtgcagacaggaaggcaagtcattcaggcagtcgtttttacaaggcatttttacggttcccggagacggatgcatcgattttaccgaagtgtaccgagcgctcgtccgtcatgattattcaggctggatcgtcatcgaagccgaacaagacccggcagtcgccaatccgcttgagtacgcgctgattgcgagaaagtacatcgacagtgaactgcttgatcctgcaaattagagggggacttatatgaatagtgccaaggcggaatcagctttcagcaaaaggactatcgccgcagcattagcaaattacattgatgcaggttccattgtggcaggatcagcgggtttatctatgtgggtcagctacttgaagctgtccgacagtcagatcggattgctcggcgccttcagcgcaaatgcgatatcagcggccgtcggagcgctgctcggcgggtatttggctgataaggtcggccgaaaagctgtatacacaaacagtatgctcgtctacgccttaggaatttgtttggttttgtttggattcaactttcccatgttgttatgcggatacatgattgtcgggatttctgtaggcgcggatattacggcttcatggaccattatcgcggaaaacgcccctgagaaaaaccgggcgaggcattgcggagtggcgcaggtggcgtgggccgccggagccgttgtggttctgctgttatccgttttggtcggtgacctcgggcttttaggaaataaaattgtctttgcgcatctattggtgatcgccctgatcacatatgtgataagaaagcgtttacctgagtcggatgcctggaaaaacagtgaagagcggcctgttgccgtaaaaaaaacatcttattttgacctgcttcagccgaaatttttcaagaacattttgtttttaatgggtgtgtttctcgtatggaatctcgcagcgggcgtcatgggattcttcatgccgtacatctaccagcaggtcggcggcgtatccgcaaatacggccaacattctgcagatggccctgtttatcttcaccgggctcggcgtcgtctgtatcttcatgccttttgcagataaatatcggaaaacggtgttcggaatctgcgcatgtatggccgttgtcggctggtcgctgtttttgctgccgtttcggggactcccgatgctgcttttgtttgttttagcgatcggcatcaataacggagccggccagcaggcgaactaccagctgtgggcaagcgagctgttcccgacagaacacagagcgtcagcacaagggctcatgttctttctcgtccgtatttcaatcggcatttggagtttatttgtgccggtcatcatgtcacaattcggcatcggttttatggccggtattctgctcatatgtgtgacggccagtatgatcatcgggcttgtcttcgcgccgaatacgtccggcaagtcgcttgaacagatacaggaggaactgtacggcgctcctcaggacggcagcgggaaaagaaagacgagaaccattatttgattatcagaaggagtggcgatcaatgaatttacgtataggtgttatcggaaccggtgctatcggaaaagagcacatcaaccgcatcacaaataagctgtcaggtgcggaaattaccgctgtcacagatgtgaatcaggaggccgcgcagcagaccgttcaggatttcaatttgaacgcctccgtttatcctgatgacgacagcctcctcgctgctgaaaatgtggatgccgtcttagtgacaagctggggcccggctcatgagtccagcgttttgaaagcgattcagcacggcaagcacgtgttttgtgaaaagccgcttgcgacaacggcagaaggctgtatgcgcattgtcgaggaagaaatgaagacgggaaaacgattggtgcaggtaggtttcatgcgcagatatgacagcggttacgttcagctgaaagaagcgattgacaaccgcgtggtcggcgagccgctgatgattcactgtgcgcaccgcaacccgacagtcgcatcgaattattcaacggacatggccgtcgtcgatacgctcgttcatgaaattgatgtcctccactggctcgtcaatgacgactatgaatccgtacaggtgatctatccgaagaaatcaaaaaatgcgctgccgcatctgaaagatccgcagatggtcatcatcgaaacaaaaggcggcatcgtcatcaatgccgaaatctacgtgaactgtaaatacggctatgacattcaatgtgaaatcgtcggggaagacggcgttatcaagcttccggaaccgtcaagcatcagcttgagaaaagaagggacattcagcaccgatatcctgatggactggcagcgccgatttgtggctgcgtatgatgtggaaattcaagacttcattgattcgatccggaataaaggcgaagtcagcggtccgacggcatgggacggttatattgccgcggtgacaactgacgcgtgcgtaaaagctcaggaatccggccagaaagagccagtggcgcttcaagagaaaccggcattctaccaatcatttacgactgtgaacaaataatagatcgggagtgaaagaaatgaaactggccttagatccatccatgtaccgcgatgatttaactttggaggaaacggtctataaaacggcggaactcggatacgaatatatcgaactgtctccgcgcgaggatttttgtcctttctataaatatccgaaagtcgattcagcaaaaatcaaacaattgaagcgccttttaaaagatacaggtgtgaagctgtcttctcttcttccgctttaccactgggcgggtcctgatgaagaccgccgacaggccgccgtgcgcaactggaaacgggcgatcgaaattgcggttgaacttgaagtggatttgatgaacagtgaattcagcggttcaaaatatgatccgttgacaagtgaagaaaaattcatcaaatccatggatgaactgctgcccgtctttgaaaaagaaggcgttaaactcaatcttcaagctcacccgtatgattttatcgaaacgcacaaaggcgcgatggatatgatccgcgcgcttgacaaggattggatcaatcttgtctactcgactgcgcatacgttcttctatgatgacggaaaaggcgatattgcgaccatgtttgatgaagccggcgaccgcctcacacatgttttatttgcagatacttttaatcataaagcggcgcatggcctgcgctacatcgtcaacccgcctgacgcgaaagtaacggttcaccagcatttggacatcgggcaaggcgaggtcgattttgagacgattttcagaaagatgagagagatgaaattcgacggaatcgcgacgaacgccgtttttgcttgggtcggcgaaagagcggatgaatcaagccggaccacgcttaagaaattaaaggaagaactgggtatggcataagctgagtatggagttcggtggagcggggcaaacaagccctccagccggactcccttcatatcgaaaacgcggatgggagaggctgacatgaaactttgctttaatgaagcgactacgctggagaattcaaacctgaaacaggatttagaactgtgcgaaaagcacggctatgattatattgaaatccgcacaatggataagctgccggaatacttaaaagaccattcactggccgatctggcggaatattttcgaacccatcacattaaaccgcttgccctgaacgcattggtttttttcaacaaccgtgatgagaagggctatagggaaatcatttcggaattcaaaagcatgatggaaacctgcaggacgctcggcgtgaaatatgtggtggccgtgccgcttgtgacagagcagaagattgtaaaagaagagatcaaaaagagcagtgtagaggtgctgactgagctttcagatatcgcggagccgtacggcgtaaaaatcgcgcttgaatttgtcggccacccgcaatgtacggtcaatacatttgaacaggcgtatgacatcgtgaacgctgtcggccgcgataatgtcggactggtgtttgacagcttccatttccacgcgatgggctccaatattgagagcttgaagcaggcggacggaaagaaaattttcatctatcatatcgacgatacagaagacttcccgatcggctttttaacggatgaagaccgcgtctggccgggacaaggggcgattgacttagatgcccacttatcagcactgaaggaaatcggtttttcagatgttgtatcggttgagctcttccgccctgaatactataagctgagtgctgaggaagccattcaaacagcgaaaaaaacaacagtggacgtcgtatcaaaatacttcaatatctaatggaaaaaggaggggtgaacatggcttttgtcaccatgaaacatcttcttgcagaagcgaaacgggagcattatgcagtcggccagtttaatatcaacggcctccaatggacgaaggcgattctgcaagcggcgcaaaaggagcaatcgccggtcatcgccgcggcttccgatcgtctggtcgactatttaggcggatttaaaacgatttccgccatggtcggcgcgttaatggaagaaatggcgattaccgttcccgtcgtgctccatcttgatcacggaagcagtgcggaacgctgcagacaggccattgacgccggattcagctcagtgatgattgacggctcccatcatccgattgatgagaacatcgcgatgacaaaagaagttaccgcttatgccgctaagcacggcgtctcagtagaagcagaagtcggtacggtcggcggcatggaagacgggctggtcggcggtgtccgctatgccgatgtcgccgaatgtgagcggatcgtcaaagaaaccaatatcgacgcgctggccgccgccctcggctccgtccacggcaaatatcaaggtgaaccgaatctcggatttaaagaaatggaggctatctcccgcatgactgatattcctctcgttcttcacggagcatccgggattccgcaggatcagatcaaaaaagccatcacgctcggccacgcgaagatcaatatcaatacggaatgtatggcagcctggacagacgaaacacgccgcatgtttcagaaaaacagcgatctgtacgaaccgcgcggctacatgacacccggcattgaagccgtggaagagacggtgcgaagcaaaatgagagagttcggatcagccggtaaagccgtaaagcagcaggtcggctgatgaaaagcactcacaacatcgtgagtgctttcgtctttccgtttatttccttctcgcgtttcaccaaagtatcacaatcaaatcaacctgttcaaccttttcaggcactttcaatccaagcgaattgtatacagcttgccccctcgtttactatagttatgaaaactagaattcgttattttccttttctttatcgatgacgtcggtaactgtcttttttgttaaaataatctataagtcatgtatctttatctttcgcagtgatttcattattaccttgtctcgaattctcataagtttataccgcatataccctacgtaaggtctcgtttagtaaaatttcttattccgtaaaccaggagaccgagacatgttattaccataattgagtaaaataggaagcttgattgaatcggtgattcatcttcgggtgacattgctaacataggctgtgtccatggatatacttgacctaatggtgtactggcaataataatggccggtaatgtaaaaacaatgctaacagcgagtggtatgccaaatgttttagacctgattgaaacaataagctgcaataaaattaatggtaaacaagctaagatccctctaattccataacctagaattgtaagtaaaggaagagtcccgcttatgcctaacatataaccgaatccaataaataagaggattaaaatgaacatactaatgaatatcatgcggaccactgtcagaaactttcccagtaagatatctgagtgtttgactggtaaggctagaagctgtttccaaccgcctcctacatgttcccccctgcaaacaagggcggcgaaaattcccactacgataggcaatacaaaagggcccataaataaggcaacttgtgtccaagcctctacccagggattgtctccaggattcataaaaaggttatagtttttaataaagttagtgtatgccagggatacacctaacaaaggccctaataaatagatgatccataactttgatcgcttaagctttaaacgttctacaaataaaatgtttttcaagtatttcgcctcctttttacaaagcatcccgtttagcaaaatgaatagagcctagaaataatataattatccctaagaaaaggctaatgcaaaggtaagatgaaagatctgggttatatcctatcccttcatactgcagaatgactgtcgaagattgactaggataagccagtggaaaccacctcgttgattgagcagctgccaaaaacaaacccattatagatgatactgatcctacaagaattgagaatgcctggttgctaaacaccatagataaccatatctggaaggccattataggcagtactgtaactaacatgctgtaactatctccaaacaaaagtccccaaggtacactaccttcgaaacctaccagtttgcccagcagtaccatgccgagcaagaagattgttgacgaaataaataaactgactactaagtaaataaatttgcttacataaattcgcattctagatacgggaaaagaaagggtttgcttccatccgtttgcttgatgctctatatttgctattattgacgcagaaagtgtggcggctaatggaaaacccagaccaaataacaaactgttatcatacagtaaatacatccacattgatccagcatggaacatttcagcttgtttttccacgtattcagatcgataagtaagatttaccaactcatatgctataatgagtaagggaaccaataagactacaatcaataacgacgaacgtttcagttttaattgatctgcccataataactttttcatagacttccctctgtaccggttaattctaaaaaaatatcctcaagtgatcgtgtcttttcttcaagtcgaaatacagacagccctgaatgaagaagtatggaattgatttctgaaacaaattccggttctgtttgagacagccacaaataatttttttgtaaatcaacctttaatcctttcctgtttagtattgtttttgcttcgattacgtcactaacaccgacttttaatagtggttttcgtttttgatgtaaacttgcaatcgagtcctgaaaaatcatccttccattgttgataattcccacttgagtagccatttgatctatttcactcaataagtggctggatacaataacactcattcccgatttaggcaattctttaattagctctcttatttcttggataccggatggatctaaaccgtttgtcggttcatccagaattaataaatcaggactgcttaacagggcaactgcaattcccaaacgttgtttcattccaagggaatactccttagtcagtcgatttgctactttagataaccttacagtttccaatacttcattgacccgttgttccggaagtcctcgtaacctcctaacagcttctaagttttcgtaacctgttaaattaccataataagttggagattctaccagtgacccgattctttgcaatatctgcaaacgattcttgtttaggttttggccaaagatttcgatgtttccttttgttggtttaattaaacctaataacattcggatggttgttgttttaccagcaccattcggtccaagaaaaccataaatttcgccgcgcctcatccttaagtttaatccatcaacagaagtatgctttttatactttttagttagatcgtgtgttaccactatttgatcattcatttgtctctcacctcacttttatcataagcgatgttctttaaacacaaacgaaactcttcctaaacattcacttaacgacatcccttgtttattttctgtatgtagttatattgatccctgaatatcaaggttaaaatatcaaaagaatattctgaacccttaacgaaagttaaattctttccttttccgacctttatgtcattgatctcatataaaataagaaataaaaaggaggataacttatgacgttagaagagaacaaaatcctcatggtggatgatgacgaacatatcttaaacttattaataacttgctttgaaaaggaaggtttcagcaatatttccacagctatgacagggagcgaaacccttctgaaaatcgatcaggaacttccaaatattattttgttagatgtcatgcttccggacactgatggcttcaccttatgcagcaaaatacgctcccatacaaatgtgccgatactcttcttaacagcaaaaacaacagatttagataaattgcaagggtttagttttgggggagatgactatattactaaaccatttaatccactggaaattgtagctcgtgtaaaagcccaattaaagagaacgactcagatctcttcttcttaccatctaaaacaggtatacgattatgaacattttaaaatagatcccaataccggaagacttgttgttaacgggacaagaatcgattgccctgctcaggaaatgaaacttctgatttatttctgtgaacatcccaatcaaattttaagtaaacaccaaatttataaagatgtgtggggggagttttacggcggagatagtactgtaatggtacatgtaagacgattacgtgaaaaattagaagaagacccgagcagaccaagatggattaaaacggttcgaggacagggctatatatttgaagcagagcctatagatgaggatttattttgaagctgagaaataggatagcattttacttcgtatcgagactttttttactcatgtttatttggggtctgctcattgtgggcagtatcatatttttcagcctcgtcttaggtcagaataaaatggaaacgccgcacttatccttaaaaaaaattgttgaccaaacagttgttgcagataaacaattttcaataaatacgaaagcaaaagaagatttattagagaaccgaatgtggattcaaattttagatgaacaaggagatgaggttttttcttttaataaacctaaaaatatacctaagcattatattcttggagagttaatatcagattacatgtatcctgccaaaaaaggttatcaattatctacgtggtacgaaacgaaaaacaatcaggatttaacatgggtattgggaaagccgatggaaaaaaataacccttttttctattgggtgaataacttgtggatagtttctattattatggcagggattgtaattgcaatattttacggaaaaaaactaggtgctcccctgctgtttattgtatcttggattgagaatttgtctaaagaaaaatatgaagaaccttatgattggaagtttcattcaagcaaatatagacataataaatctggatataagacctatcaagaattaatgcaggctctgtctgaacttacctcaacgcttcaaaggaataaggctgagcgagaattattggaaaagacacgagaagagtggatggccggtgtctcacatgatttgaaaacccctctttcggttattaagggatatacggttcttttatcttcaaatgaatatgagtgggaaaatcagcaagtgcgtgatttttccttaataatggaagaacgtgtcgaatatatggaaaagctgattgaagatttcaacttaacttttcaattgaaaaatgagtcgcttccaatcgatcttgaagaaaaaaacgtagtgaaagtaattcatgacactttagaaaaaatgaagttgctaccggagtcagaaaataagagattcgctatagaatccagtcacaataagatactttttaatatggatgaaaggtacctaaagcgcgcagttgaaaacttgattgctaattgtattaaacataatcctccgggcactaaaataaaggtcatattatatcaggacgtgttacatgacaatgaaatacaaattataatagaagacgatgggataggaatggacgaagagacggtcgaatgtttatttgatcggtatttcagagggacaagcgctacgtcaaataactcagggactggattaggaatggctattgctcagcaaattatcaaggcacatgggggaaatattgatatatatagtcagccgggaattggcacaagatttaaaattacctttccgagtccgccatctaagtataacaatgtcaattagaaataatcgatcttacattgagaaagggagaagcgggtcttttataaaggcccgctttctcatgttgcagagaaccgatgaaagcattatgatgggggcatcaaataatgagggctccgaaaagccgtatccttttggaggatggttgcatgaataaaatcatgattgtggaagatagtgaagacattcgcggactattgcagaattaccttgaaaaatacggatatcaaaccgtggccgccgcggatttcacggctgttcttgatgtttttttgcgggaaaagcctgatgtggtgctgcttgatatcaatctgccgtcttatgacggctattattggtgccgccagatccgccagcattctacaagcccgatcattttcatctcagccagaagcggggaaatggatcaagtgatggcgattgaaaacggcggagatgattatatcgaaaaaccgttttcttatgatattgtgctggcgaaaatcaaaagccagatccgcagggcatacggagagtacgccgccaagcagggagagaaagtggttgaatatgccggtgtgcagctctttgtggaacggtttgaactgcgctttcaggacgaaaaaagcgagctttctaaaaaagaaagcaagcttttagaagtgctgcttgagcggggagaaaaggtgacgagtcgggaccgtctcatggaaaaaacgtgggacaccgacattttcgtcgatgataatacacttaacgtgtatatcacgcggctcagaaaaaaactgcgggagctgaatgcgcctgtttccattgaatcggtgcggggcgaaggctaccagctgagggcgctgtcatgaagctgtttctccggtctcatgccgtgctgattctgctttttctccttcaagggctgtttgtcttcttttattactggtttgcgggtcttcattctttttcccacctgttttacatattgggcgtgcagcttcttattttggcgggttatcttgcctaccgctggtacaaagaccgcggcgtgtatcattggctcagctcggagcaggaagggacggacatcccgtatctcggttcttcagtattctgttcagagctgtatgaaaagcagatggagctgatccggctgcagcaccagaagctccatgagaccgaagccaagcttgacgcgcgggtgacgtatatgaaccaatgggtgcaccaagtaaagacgccgctgtcagtcattaatttaatcattcaggaagaggatgagcccgtctttgaacaaatcaaaaaagaagtccggcagattgaattcgggctggagacgcttctttattcatcaaggctcgacctgtttgagcgggattttaaagttgaagcggtttccttagcagagcttctccaatcggtcattcaaagctataaacgattttttattcaataccgcgtctatccgaaaatggatattcgcgatgatcatcagatttacaccgatgcgaaatggctcaaatttgcgatcggccaagtggtcacaaatgcggtcaagtattcggcaggcaagagtgacagactggagctgaatgtcttccgcgatgaagacaggacggtgcttgaagtcaaagattacggtgtcgggattccctcgcaggacatcaagcgggtgtttgatccttattacaccggtgaaaacggacggcgtttccaagaatctacgggaatcggcctccatctcgtcaaagaaattacgggcaagctcaatcatacggtggacatcacttcttccgccggtgaagggacatcggtccgattttcatttcttacaaaaatgtaagactgcgttaagaaaacaacatagctcgttctgtttccccttgataacatggatttatgtcaaggggattttttatgctgaacgccccggcgctacatgaaagcagcccagattaacaagaataaaaccataaggaggattttcatggcgaatatgcttgaagtcaaacatataaataaaacctataaaggacaagtgtcctatcaagctttaaaacaaatttcgttttcaatagaagaaggcgggttcacggcggtgatggggccatccgggtccggaaaaacaacgcttttgaatatcatttcaacgattgaccgtccggattcaggcgatatcctgattcacggagaaaacccgcaccggctgaagcggacaaagctcgctcatttccgccgcaagcagctcggatttgtgtttcaggatttcaaccttctggacacactgaccgtcggtgaaaatatcatgctgccgttaacgcttgaaaaagaagcgccgtctgtcatggaagaaaaactgcacggcatcgcggcaaagctcggaatcgaagacctgctcaacaaacggacgtttgaagtatccggcggacagcgccagcgggccgccatcgcaagggcggtcattcataagccgtcactcattctggccgatgaaccgacgggaaaccttgattccaaagcgtcaaaagacgtcatggaaacgatgcagagcctgaatcaggatgatcatgtcacggctttgatggtgacccacgatccggttgcggcaagctactgccgccgcgtcatctttataaaagacggcgaactgtttaatgagatttaccgcggggaaaaccgccaagtcttttatgaacaaattctcgatgtgctgtctatgctggggggaaacgcaaatgacctttcttcagttcgcttataaaaacgtcacgagaaacaaaagggcctatcttgcattcttcttgagcagcgctttttccgttttgattttctttacctttgcgatgttcctgtttcatccggcactaaaggaaggctacctgaataacatcgccagaaaaggcttaaccgccgcggaatggatgatctttgttttttctttcttatttgttctgtattcggttaacgcatttttgaaatcgagaaataaagaattcggtattctgctgatgcagggcatcacgccggtgcagctgagaaagctcattacggcggaaaacatgatcatcggcgtcatgtcgatcgcagccgggattatcggaggcttcattttttcgaaaacgttctttacggtcggcgcttatattttagaaatggacgcgctgcctctgtacatgccttggaaagcgctcggtattacggccggcggatttctgctcttatttttccttttatcgcagttcacgatcctttttgtcagatcaaatacggtgatcaaattaataaagggcactgacaagatcaagccggagccgaagccgtccgtgcttctgtccttattcggcatcgcctgtctttgcggcgggtacggcatggttttaaaaggcaatgtccacgggatcgagccgttcatcattttactgcttaccgttatcggcacgtatttctttttcagccaaagcagcatctggattctgcgcgcgctgaagaagtggaaaaccttttatctgcgcgggaaaaatgtcatttgggtttctgaccttgtctatcgtttaaaagacaacgcccgcctgttctttatcgtcagcattatttccgcggtagcgtttactgcgacaggcgtgctcgcgatgtacaaatcgaccgtcggagcagaagagtccgcctatgagatggagtatgtatctttcagcaataatccaaaagaacagactcatttgaaagatattgaccatgaactgaaaacacacggctttacgtataagaaagacaaaatagatgtttcctatgtccgctatcagaaaggggatactgttccgcctgtttacatgatcagcgaatcggaggcggcgaagtacttccatgttaatctaaacggcctgaaacatggcgaggccgtctatttcccgggcacgtatgaccgcaatttcaaaaacgaagcgccggatcagctgaagctgctgaaccaaaaaggcaagccgtctgaccaaaaactgacggtaaaagaagtcaaaaaaccgctgatctcattgaatgccatcatcgcggtgaacgatcaaacctttgatcagctgaaatcactcggtgagaaagcgtcattatacggctacagctatgatcattggaaagacagtctagggatcagccaatccttgaaaaatgagatttacggcaactatatcgacgtccattctgattttatggcaaaagctgggacgtactatgatacggtgcagctgccgagcctgagtttattcatcggcctgtttatcgcgatcgtcttctttgtcgcggcagcaagtttcttatatttcaggctgttcaccgatttagatgaagaccgggagcgctaccgttcactggccaaaattggcctgagtgagcgtgaaatggcacaaagcgtaacgatacaattggcgattttgttcttcttcccatttgtcattgccgtcatgcatacgctgtttgctttgagaacattggccgtggaaggctattccgatgtagcggggccgctcagtctgaccatcggagggtttttcatctttcagcttctgttcttcctcgcggtgcggacaagctatttgaaaaaaatgaacaagtaaggggagtgcacagatgaaaaaagcattggcaatcctggccgtcttggcggccgctgccgtcatatacggacttctcttttttcataatgatgttacagacagatttaatccgtttattcaccagcaagatgtctatgtgcagattgatcgagatggcaaacatcttagcccgggcggtactgagtatacattagacggatataatgcatccgggaaaaaagaagaagtgacctttttcgccgggaaagaccttcgaaagaacgcgtatttgaaggtgaaggcgaaaggaaagtatgtcgagacctgggaagaagtcagatttgaagatatgccgggctccgtacagtcaaaattaaagtgaacatgaaaagcggcacagtgtcatgactgtgccgctttttttattttttattttcttcagcccgtttgatcagcatgtcggtgatgatatccatctgtttgctgacggcaatcgggtcatacggatagaaggtgttgaaatcgttaataaagacacgattgtgttttacggcatcgagatttttccaaacggatgaatctttcagacgctcaaatgtgttgctttctccattcggattgtaatcggtaatgaacatataatcagccgcatattgagggatgacctcttgggaaacctgtttcatggcgcccgttttcatgatgtttttttcaattttggccggcgctttcaatccgagcgcgttataaacggcttggccgccgcggccggaattgtcattgaaaacccagatctcgcctttatccgtcgtttcataaaggccgactgtctcgtctttgccgatcacgtttttgaggcgcttttgattcgcttcggcttttttgttgaagtctgccataaagcttttggctttatccttcgctccggcaatgtcgccgaataggctgaccgtatctttcgtattctttgcggtgttaaaaggaatgacaatcgtcggcgcgatttttgatagtttctcgtattggtcttccttcatcagcacgattaaatcaggcttcagctgcatcactttctccacattgacgggattgccgatgtcagtaatgtttttcagctgttttttgataaacggatttttgaaagtccatgagcccgccccgacgacatttgcgtcaacggacagcagctcacctgcataaaagtcagtgacgatccgtttcggatgtgcgggtatgtcaatatttccttttgttgattcatatgtacgcatgtctgtctttcctttgcctgatgccgatccgttgttctccttcgcgccgctgcaagcgcttaatgcgaaaacaagcagaagtgccaggccgatcagccatgattgtttcttcataatgatccccctatttcagtgataatgattatcattattaatatagcaggaagtcgtcattccgtctatgttttttatagaaaaccttccttgattatccatgttatagtagtaaaggaggaatgaatgttgattacgaaaagagggatttggtgggaagtgctgcacagctggtggctgctgctgacttttgcgccgtttgcgctgaccgctttcttggcctttttctatatcggctaccgggccaagaacaaaaaatggctgaaatacggacttatctattttattagcaattgcttttgtgctgccgagcacgccgggcgtgtatatcgtgctgcctttatggatcatctccattatccacgggctgaaagtgcgggcggcttatttaatacagcttgatgtgtttaaacaaaacgtcgaagcaagagcgtttgaagcggtaaggcatgaggctgaagcaaaattcggcggaaaacccgctcatcgcattgatctgacaaaacagagataaaaacaaatgacaaagccggtatctcgcgctttgtcatttgcatgaccggcctattgctggtatgaatgctgctgaaacggtgtgtgatgctgtgtttgcgggaatgaagaaacattagtgttcgccatcggtgcaggcatgtgtccgcttacttcctgctgaagctgattgcacacatttacgatttgctggcatttctgaatggcccttcatgcccctgcagcgcttgctgaatggtatgaacggcatgctgttcatggttaagcatctgctgaagcatttgaatgttttgctgttcctgctggagcatttgcttgtactgctgactgctttgctgtgtctgctgaataagctgctgtgctgtttggcggcattgctgcagctgatttccgctgtattggttttggtacatcatgaagacctcccggagtgattgattttacacatttatcatgtgaaagaattggagaggcattcatgcaagaaaaggattcaaatatttacctattatgtacagagcggaatacaaggctcgggatggcctgtcgagctttgtattccggccctttttctcagaagccgccttctgtagcttgaaaaggaatattgagtctgttttcgactgcgcgcaggcgctgattcaaacggtttaagcggcgggtatggatatcaatggactggctcagccgtctgatctgctcattcatacgcgtgatttcccggttttggcgctggtcttcatttgagaggcgggtgagctctctcgattgctgggcgttttgtctttcaagctgggcgactctccgttctaaagccgtcggctgccgctcttcggactgagggggcgcataataatagctttcctgctgctgatacggctcatactcaacgcggttcacttcgtattcctgctgctgagggaaataggcagtcggggtgtagtactgatatgggttcattcatcattctccttatctagtgaagtctttatacactatgtagtcaattgcacagtgccacggcatccgcctaacttacagacgtaaaaaaagcttcaaaggaaggtgatcatgttgcggaacatacggattttcatcatgacggttcttgttttcggatgcgtcatgataacaggctgctcgcaaaagaaagcagacgatacccctttttattacgggacatgggatgcggggctgaaaccgggcccgatggacggggtcagatctgaaaccgtcacgtttacgaaagacagcgtgctgacaaagcaggtcattaaaggccgcggcgaggttcccatgccctcggatgtgtacaaggtgatctcacaaaacacggacggaacgatcgagattgaatacctcggacatccgcaccccgtcaaaagcacgttgaaaagaggaaaaaacggtacgctcatttggaagatatacggagaaacaaaaacaatgacaagaataaaaaccggcggggaggatgcacatgagaaataaggctgccgacagactcgttttgacgggtgtcatcgtacatatcattcaatggttttcactgttatggttattttttatgctttttgatcagttcgggcgttttaccatttacaatcccaatgtcgtcaacggcagcatgcagtctttttcattctttgatatgatgcgcgctcttctgttttccggcacgctgcggaatacgcttctgctgtttctgtttgcggcaatgctcatttacttgtgggtgaacgctctgtttatcctgctggaaatcgtttcttatatcatgatcaggcggaacagccgttcattatgggcatactttcccgcagcgatgggaataaagcttgcccttctggacatagcggccgtccctttctttgcggcggggctgatgctcttgaagcagaaaacagatgacggcggcgaacaagctgacaaggggaaaagacggccccgcatccggaggcaggcccggtatacgaagagaaggcggagaaactcgtccgtttgatttttcattgaaacgaaaaaacgatatgatgaaagcataagaagaaaaggatacaaaggagatgcaggatgtacaagttaatcgcaatagatatggacggaacactactaaacgatcatcatgaagtgacggctgaagtccgcggggcgcttgatgccgccaaagcggaaggggtcaatatcgtcctgtgcacgggccggccgatcggcggcgtgcgtcggtatttggaagagctgaacttacaggaagaaggcgactttgtgattgcctataacggcgcactcgtccaaaatacgtatacaaacggtgtcgtggccgagcagtcattaggttatgaggatttgaagtcgctttacgagctgagcttacagctggatactccgatgcattactttgacacagccaatctgtacacgccgaaccgggatatcagtgaatacacggtatacgaatcatacattacgaaagtgccgcttcatttccgcacgatcgatgaagtgccgaaggatattctgattccgaaagtcatgttcattgacgatccggacaagctggagaaagcgatcgcttccattccggaatcattcaaagaaacatacacaatggtcaaaagtgcgccattcttccatgagattcttcacccgaaagtcagtaaaggaaacgcggttaagctgctggccgaaaaactcggcattgaacagaaagacgtcatggcaatcggcgataacggcaacgacatgtccatgattcagtgggccggctgcggtgtggcaatggccaatgccatcccggaagtaagggagattgccgattttgaaacaaaatcaaataacgaacacggcgtggcgcatgcgattcaggagcttgtgctgaaaaaataggcaccccatgagagggtgcttttttaccgcgtgttttggtgatatgataagcggagaggggaggcgcgacatggatcgtgaaaaacagcagctcagcatagaagcggcaaaactatattatcaatcagattacagccagcagcagatcgccgaacggcttaatctgtcacgccctaccgtttcaaggctgcttcagtacgcaaaggaaaaagggtatgtgcaaattcgcgtcatggacccatttgaggatctggacgaactcggcgcgaagctggaagaaaaatacgggctgcttgaggcgcacgtcgtcttttctccaagcgacgattaccaggccattacacattacttaagccgctatggcgcagactatatgcataaaaccgtaaaggacggcgatatactcggcgtaagctgggggacgacgatgtaccagatcgcaagccgcatggagccgaagcaggtaaagagcgttgaagttgtgcagttgaaaggcggcatcagtcattccaatgtcaatacgtattcgtcagaaacgattcagctgttcgccgaagcatttcagacgatgccgaggtatttgccgctgccggttatatttgacagcgccgatgtgaaacagatggtcgatcgggacagacatattaagcggatcattgaaatgggcagacaagctaatatcgccctgtttacggtcggaaccgtccgggatgaggcgctgcttttcagactcggctatttccgggaagaagagaaacaattactgaaagcacgcggagtcggcgatatttgttcgcgcttttttgacgcggaaggcaggatttgcagcagcagcattaacggccggacgatcggagtcgagctcagcgacttgaaaatgaaagagcgttcgattctggtggcgggcggcagcagaaaatgcaaggccattcacggtgccctgagaggaaagtacgccaacgttttgattaccgatcagcatacggccaaaaaactcattcaagaattgtgacaattcatgaacataatttcaattaccaatttacatatgttcaaaattcggttattctaaacgtatcctaggaaaaaggaagtgcatacaatgtcaattgcaagtcaaatagaccatactgctttgaaaccgcatacacaaaaagcagatattttacaactgataaaagaagcaaaagaatataaattcgcttccgtttgtgtaaacccaacttgggtcaaactcgcagcggaggaactgaagggcacgggagttgacgtttgcaccgttatcggatttcctctcggcgcaacgacatcggaaacaaaagcatttgaaacgaaggatgccatctcaaaaggagccactgaggttgacatggtcatcaatatcggcgcattaaaagacggcgatgatgaagtggttgaagctgatatccgcgcggtagttgaagcagctgataaaaaagcgctcgtcaaagtgatcatcgaaacatgccttttgacagatgaagaaaaagagcgcgcgtgccgcttagcggtatcagcaggcgccgatttcgtcaaaacgtctaccggtttttctacaggcggggcaacggctgaagatatcgctcttatgagaaaaacagtcggaccggacatcggggtcaaagcatcaggcggcatcagaacaaaagctgatgttgacagcatgatcgctgcgggcgcgagccggatcggcgcaagtgcgggcgtctctatcgtgagcggcggagacagcggcagcagcgactattaatcagcagtgcggaagctgaaagcttccgccatcctctttctttgttgatgcataaaaaattgtaagcgaatacaaataaaaggagaacacatatgaagtatctcatcggaattatcggaatcattgtgtttttaggtcttgcctggcttgccagcaacggcaaaaaaagaatcagaatccggccgatcgccgtcatgctcgtgctgcagctgattctcggttatattctcctcaacaccggtatcgggaattttcttgtcggcggttttgcaaaaggatttaactacttgctggaatatgcatcagaagggattaactttgtattcggcgggcttgtgaatgcgaaacagacgacgttcttcatgagcgtgcttctgccgatcgtttttatatccgctttaatcggaattctgcagcactggaaggtcctccccttcatcacgaagtatatcggtcttgcgttaagcaaggtgaacggaatggggaaaatcgaatcttacaacgctgtcgcatctgcgattttagggcaatcagaagtctttatcagtttgaaaaaacagctcggttatcttactgaacagcgcttatatacgctttgcgcgtccgcaatgtcgacggtctcaatgtcgatcgtcggttcttacatgatgatgctgaagcctgaatacgtcgtgacggcgcttgtgctgaacttattcggcggatttatcatcgcttctatcatcaacccgtacaccgtcagcaaagaagaggatttgatcgtcgttcctgaagaagaaaagcaatccttttttgaagtgctcggtgagtatataatggatggattcagagtcgccgtcgtcgtagcggcgatgctgatcggatttgttgcactcattgccctggtcaacggcgtttttaacgcggtcttcggcattacattccaggcgctgctcggatatgtattcgcgccgtttgcgtttttaaccggtattccgtggaatgaagcggtgagcgccggaagcattatggcgacgaaaatggtatcgaatgaatttgtggcgatgcagacactctcatccggcgatttccatttcagtgcgcatacacaggcagtggtatctgtattccttgtctcattcgcgaatttctcctctatcgggatcattaccggtgcggtgaaagggctgcatgaaaaacaaggaaacgtcgtcgcgcggttcgggctgaagctgctgtacggcgcaacgctcgtcagcttcctgacagcggcgatcgtcggattgattcactgaacataaatgaaggacaggtgatagatcatgagaatggtagatcttattgtaaaaaaacaaaatggaaaagaactgacaacagaagaaattcaatttttcgtaaaaggatacacggacggaagcatccctgattatcaggcaagcgcgctggctatggcgatttactttcaggatatgacggatcaggagcgcgccgatctgacaatggcgatggtgaattcaggggaaacgattgatctttccgccattgaaggcattaaggtcgacaagcactctacgggcggggtcggcgacacgacaactctcgtactcgcaccgctcgtcgcggcgctcggcgttcccgttgctaaaatgtccggccgcggtcttggccatacggggggaaccattgataagctggaagcgatcgaaggcttccacgtggaattgtcaaaagatgaattcatcaagcttgtgaaccgcgacaaagtagcggtcatcggacaaagcggcaatttgacgcctgccgataaaaagctgtatgcgctgcgtgatgtaacgggtacggtgaactccatcccgctgatcgcaagctcaattatgagtaaaaaaatcgcagccggagcagatgccatcgtgcttgacgtcaaaacgggcgccggcgcgtttatgaaaacggatgaagacgccgtgaacctcgccaaagcaatggtccgcatcggaaacaacgtcggccgccagacgatggccgtgatttctgacatgtcgcagccgctcggttttgcgatcgggaatgctctggaagtacaagaagccattgatacgttaagaggggaagggcctgaagacttaaacgaactcgtcctcacgctcggcagccaaatggtcgtattggcgaaaaaagccgagacattggaagaagcgagaacgaagctgcaggaagtcatgaaaaacggcaaagcgcttgaaaagttcaaagagttcctgagcaatcagggaggagacgctactgtagttgacgatccgtacaaacttccgcaggcggcgtacaaaattgacgttccggcgaaagaagcgggtgtcgtttcagaaatcgtcgccgacgaaatcggcgtcgcagcgatgctgttaggcgcgggacgtgcgacaaaagaggacgaaatcgatcttgccgtcggcattatgctccgcaaaaaagtcggtgacaacgtcgaaaaaggcgagccgctcgtcaccctttacgccaaccgcgaaaacgttgatgacgtgaccgccaaagtctatgacaacatccgcatctcagaaaaagcggaagcgccgaaactgattcatacgctgattacggaataagagaagaaaggcacatacctcatcagtatgtgcctttttttatggcatggttttatccaaatgaatgtcacggacggattgtttcggctgtttctttctcaaaaaacgaatgagatagcacaggatcatacaaggaattccgcagaagagggcgattctttgattgggatcaaatgcaaggcctacgcatgaagcgaaacataagatcacagcggcgatcggaacgagagggtataacggtgtgcggaaggtcagatccgagacgcgtccgccattttttacataatgttttcgaaataacagctgagacagggcgatactcatccacaccacgacgccggcaaatccggctattgccacaagcaccacgtagaccgtgcccggggcggcgatgcttgagatcaaggatatgcaggatacggccatgctggcgagcagagcattcagcggaatgcctttcgacgtgatttttttgaaccgggcgctgatcatgttttcattcgccagagaccacagcatccgggtggaagcatacagtccggagttggcgacagaaagcaaagccgttaaaatcacgaagttcatgatatctgcggcgtatgggataccgatttgggaaaagaccgcgacaaacggactttcaatcacaccggcttccttccaggagatcagtccggacagcacaaaaatggcgccgataaaaaagataaccgttctccaggcgacattccggatcgaacgcggaatatcttttgccggattggcggtttcacccgccgtaattccgatcagctccgtccctgaaaaggcgaagcttacggaaatcattgcgatgaaaaccgcaagaaagccgttcggaaacagtccgccgtttgaggtgaaattcgacagcattggagcttcactcgaaccgtgcaatgaaatcaaaccgaacatcgcggcgccgcctaagatgataaataaaaggatggtgacgattttgacgctggaaaaccaaaactctgtttctgcaaacaatttaacggagaatgcattggcggcaaaaaggagagccgcgaaaatcgcgctccacatccagacgctgctgtggggaaaccagcgctgcataaggataccggaagctgtaaactccgatcctaccgtcaccacccaattcacccaatacatgataccgaccataaaacctgtggacggtccgataaacgttgtcgcatacgtttgaaatgaaccggtcacaggcatggctactgacaattctccgagacactgcatgacaagatacatcatcaagccgccgatcaggtaagcggcgatcgtcccgcccggcccggcctggctcaatgtataccctgtgctcaaaaacagccccgtgccgatgactcctcccaatgaaatcataaataagtgcctgcttttcatcgtgcgctttagttgattgccgccttgatcaacatccatcgtgatctccccctttttgcgtggcgtgagaatcttccggcagcagagagcacgcgtgccggaattgactttaacgtgacaatttaaatccctttaatgcatgtaaaatgacgtgtgcggctgcccggcttgtcatatcgcgaaaatcaagtgtcggatcaacctcaacgatctcaatacccgagatgtcagcctcctgggctaaaaacctgaccgcctgaagcagttcttcggtatacagacctccggggccgatcgcggggcagccgggcgcatgagcttgatccagcacatccatatcaaccgaaataaaaatggtgtcggttcttttttgaacggccggcaagacctcttgtatcgttcggaggagccctttctcccggatcatctccattgtatacacttctgcctgccgctcttttacatattgttcatatgccaagctgttgctgaactccctgattccaagctgaatcaggttttgtccgcttatgatattttcatctaacagccggcggaatggcgtgccgtttgtcggccctccgtcttttgtgttgcggacatcgtggtgggcgtcgaattgaaagacggccgttgttcctttcgtttccgcaatggctttaatggtggaataactgatggagttgtcgccgccgagaatgacgggcacccagtcaggctggtccgtcagaatgtcatgaatggtccgataaatgtgttcgtgagatttaacgacatccgtgacatgaatctgaatatcaccgatatcgtacagatggtcaatgacatgctcccgcagctctgcggaatatgcggaaatcccgccgagcgcccggcggatcgcaccgggggcaaagcaggcaccggaatggctgattgacgacttagaaagcggaacgccgatcaaagccggccctttgatcgtttgtcccgcccacgcttccgtcacatcgccgatccttgtcacatggcggtcgttgaagagggagccggctttttgcagaaacggatacttatccaagagcggctccctcccttgaaacgaccgtctttccgttcttgatgacacggtgtacatgattgacgccgtaatgatacgggatatacatgtaattcggcgcttcccaaatgacaatgtcagccgcccgtccggctttaatttgtccggcctcttcgccttttccgatcgcatacgcggcattaacggtgacagcgtgccagatttcttctgcggtcatttttaaatgaagcgcggcaatcgacatgatgagctggagattttccgtcggtgagctgcccgggttgaagtcagtcgccaaactgacccgtacgcccgcatcaatcatctcccgggctctcgcataagtgtgtttgccgagatagaaagtcgtgcccggcagcaggacagcgatcgttccggactccgctagcttttcgatgccttcgtcagacgcccccaccaaatgatcggcagaaacagcatgcagctctgccgccaattccgcgccgccgagcgggtcaatctcatcagcatggattttcaggccgaaaccagcttcagccgcctttttcaggtagtcccgtgactggctgacggtaaagacgcctgtttctgtgaaaatatcggcaaattgcgcgaggcctttttcttttatttcaggcaaaagctgcagcatgcgattcagaaattcgtcagggctgttacggtactcaggcggaatggcgtgtgcccccataaaggtcgtgacaaggtcgatcggctggcgcccgcccagttttttcgctgcggtcagctgtttcagctccgtgtctttgtcgagtccgtacccgctttttacttccgcggtcgtgatgccgtatgacagcatgcgtccgaggtggaaaagccctttttcaatcagttcttcttcggaagcggctttcgtgtctttgaccgttgacaaaataccgccgccttgcgccagaatatccaagtaggacatgccctgaatttttaaattcagttctttttcccgggaccccccgaatacaagatgggtatggggatcgacgaggccgggggtgacgagccgtcccccgcagtcgatgatgtctcgtgcctcgtatccttcctccgctccttgatgtccggcaaaaacaatgcgcccgtcgtgaatgccgatgacggcatcttccgtgacacgaagatcttgcatgcttccgcctgatcgggggccgccggattccatcgtcagcagctggccgatgttggtgagtatggtatctatttgtttcggcatgttaccgctcctttttcatcggtatcataatgtcttgttcctcggcgacttgagccgctttttcataacctgcgtccgcatggcggatgatgcccattcccggatcgcttgtcagaacgcgggaaagccgctgttccgcaaggatgctgccgtcagcgaccgcgaccattcccgcgtgaagggaataccccatgccgacgcccccgccgtggtgaaaagaaacccagcttgcgcctgaggccgtgttgatcagcgcgttcagcaccgcccaatcgccgaccgcgtcgcttccgtctttcatcgcttctgtttcccgattcggagaggcgacagatccgcagtctaaatggtctcttccgatgacgatcggggctttcagctcgccgtttctgaccaattcattgatggcgagccccatcttttcccgttcaccgtagccgagccagcaaatacgggacggcaggccttggaatgtgacttttttctgcgccatgtcaatccagcggtgaagggcttgattttctggaaacagctcttttaataaagcgtccgtgcggtatatatcttcagggtctcccgacagcgcagcccagcggaacggcccttttccttcacaaaataacggccggatgtaggcgggaacgaatcccgggaaatcaaaagcatcggcgagcccctcatctttggcagcttggcggatattgttgccgtaatcaaagacgatagccccttttttcttgaaggcgagcatggcttccacatgctttttcatactctgcttggaaagccttacgtataattcaggctgatcccggcgcaggcagtcggcctcttcaagtgagtatcctgccggaatatagccgatcagcgggtcgtgagcggaagtctgatcggttacgatgtcaatatggacgccgcggttcaaaagctcatgatgcacctcagccgcattgccgagaaggccgattgataaaggttctccggcttgtctggctgcttcggcccagcgcagcgcttcgtcaattgatgcggttttacggtcgcaatagtttgtttccatccgtttatcaatccgtgtttcatccgcttcaacggcgatgacgacgccgtcattcatcgtgacggacagcggctgggcgcctcccattccgccaagtccggccgtcagcgttagggttcctttcagactgccgccgaaatgctgtctcgcaagctccgcaaaggtttcataggtgccttgcaaaataccttgtgagccgatataaatccagctgccggccgtcatctgcccgtacatcatcagcccttttttctcaaggtcatggaaatgctcccaatccgcccatttcggcacgagaaccgaattagccagcaggacgcggggcgcgcggctgtgcgtgcggaacagtccgaccggttttccggattgaatcagcagtgtttcatcatcttttaacgttttgagggagcgctcaatcgcgtgaaaagcatcccagtttcgcgcggccttgcctatgccgccgtatacgatcaattcctccggcttttcggcaacctccgggtcaaggttgtttcggagcatgcggagcacggcttcctgctcccatcctaagcattcaagttcggtgccgcggccggcgcggattgatttctttacatcagtcatcttgtaagtcccccttcattggtcatcagtttttggtgatgctcattcggcagaaaagactccttcttcagccagtcactcagatgctcgatgtcataagaaaacacgcggtcttcttgtatggacggcacgatgtttctcatttcgtgatagagctgttttgtgtacgaggcgcaatgttccgcaccccggtattccacggcctgcagcgcgcaaatggcttcaacggcaagcacccgtctcgtattcgcaatgatctggtaggcgtgccttgaggcgatggttcccatgctgacgtgatcctcctggtttgccgatgaaggaattgaatcgacactggcgggatgggccagggttttattttctgacacgagggaggccgccgcatattgcatgatcatcgctccggattgtaagccgggctgagggctcagaaagggcggcaggtcattcagctgcggattcacaagccgttcgatacggcgttcagaaatattcgcaagttcggccgccgccactttgagaaaatccatggcaaaggcgatcggctgtccgtgaaagtttccgcctgagatgattttggcgccgtcttcgaaaatgagcgggttatctgtcgcggcattcatctcaatttctaatttttcttttacatacgctaatgtctgccatgatgcgccatggacttgaggaatacagcggattgaataggcgtcctggacacgcagctccccttggacggtcgtcagcttgctgtctgacaagtaatagcggattcgctcggcgacatccatctgttcctgataaccgcgggcggcatgaatgtcctcgtcaaacgcatcgataatgccctgaaggccttcgatcgttaagctcgcgatccgttccgactgataggccagcttttcggcttcgaggtaagcgatcagccccatcgcggtcatggcctgcgttccgttgatcagcgcgagcccttccttagaggtcaggacggccggctgaaggtttgtcttttctaaagcatgagctgtcggcatccgggccccttcgtaaaagacttcgccttgcccgataagcgccagtgcgagatgagaaagcggcgccaaatctccgctcgcccccagtgacccttgctgcgggatgaccgggtgaatgcgatgattgagatacgcgagcagttgatcaatcagctcagtccgcacgccggaaaagcctttcagcagggcattggctcgcaaaagcagcatggcccgcgatacagattccggaaacggatcaccgacgccgcacgcgtgagaaagaatcagattcagctgcagatccgcggcgtcttctttttgaatcagcacatcgctgaacttgccgaatcccgtcgtaatcccgtaaatggtcttctcttcttgaacgatccgttcaaccgccgccctgctttttttcacacgtttcatgctttcggcagatgcttgaacctcttcaaaatcaaacagcacacgctgggcatctgcggttgtcagtgaggaaccgtctaacgtcaccatcatttcaaccccttttcctttactttggtaaagcgcccatacaaaaaggagctatgccatgaaaatgatatttcacgcatagccccctatcatctgaaatctatgggctgattcatatgtgattaattccgaccccgaatgtttcgtgctcaagccccttaatcggagccccgatcgtgccgtaaagtgaaacggcgatccaatcgccttccgcctcgctttcatacggatttccccgcaagacggcaaacttcaggcccacggtacgaagcaacgagccaagcagcatttcgccccgcgtcactccgtgcaaagcttccattgtggcatgatacagcgcatgtgattcgcgataaccctcagattgaatgacaccgctctttttggaagcggtttcaattgcagctactaccttatgcgcatccattgaacccaccctgccgagacagactttccagccgtcccgttccagccggctgatctgctggttttcttcagtctcatgaagcagaagaaggacggacaatcgcccgatgcggcggtctttgtgtaaggtcatatatgcttcactcaattcttaaatattctgataactagtaactgttttttatattaagtgtttgcgaatcagaagtcaaaactttttttccagtctttcacaaatcagattgctatcgaagtaaagcggtacatcgtgaagtcggcgctgttgatcacatatttccgccatccgcatcataaaatggagcgttgtcttgaaagcgttttaagaaaagaagagagcgaggcgatttcagaaaatgaaaactagtttctttcgtgtgtgcctggtctcagcagcggtcatcgggttcactctgccgcaggcaaaagcccagcatccggttttttcagaggtcagcgtgcatgatccgtccgtcatcaaaacaggcgatacatattatgtattcggctcgcatttggcttccgccaagtcgaaaaacctgatgcagtggcagcagatgtcttcgagcgtcaatcccaataatcccctgatcccgaacgtctacaccgaattaaaagagacattcgactgggcccagtctgatacgctgtgggcgccggatgtcgcccagctgtctgacgggaaatattacatgtactataacgcctgtaaaggagactcaccgagatccgctctcggtgtcgccgtgagtgacaagatcgaaggaccctacaaaaacaaaggcatctttttgaaatcgggcatggaaggaaaaagcgaagacggcacgaggtacaatgcaaacgttcatccgaatgtcgtagatccgcaaacgttttttgaccataaaggcaagctctggatggtgtacggctcttactccggggggatttttatactagaaatgaatccgaaaaccggtttcccgctcccgaaccaaggctacggaaaaaaactgctcggcggaaatcacagcagaatcgaaggcccgtacatcagctacaatccggaaacgaaatattactatctgtatctgtcattcggcggacttgacacagccggcggttatcatatgcgtgtggcgcgttccaaaaatccggacggtccgtactatgacgccgcaggccataacatgcttgatgccaaaggaaaagacggcagcttcttcgatgacaaagcaattgaaccgtacggggtcaaactcatgggcggctacagcttcgcctcacaatctgaaaaaggcacgggctacgtatcgccgggacacaactccgtgttttacgacgggaaaacgaaacgatcatacctcattttccacacccgtttcccgaacagaggcgaagagcacgaagtcagagtgcatcggctgtacatgaacaaagacggatggcccgttgcagcgccataccgctatgcgggagaaccggatacacacatatcggcggccgccgtatccggaacctacaaactcatccagcacggaaaagacatcacagctacgatcaaaaccccaaaaaacatccggcttaacaacgacggcaccatttccggggaaatgaccggaacctggacaataacggacagcagcaaagcccgaatcaacctgaacggcacaaattatgacggcgtcttcctgaaagaatgggactcggcgagagagaaagaagttgtgacgtttagtgtgctgagcggtgatggggaggctgtttggggagtgaagtgaggtggactcagaatcttcttttaattaagaaggttcttttttttgtaatataaaaaagcacttgaaaagtaattaatactctatagagtataatattgttatagagattgttttattatagttgtaagttcttttaaaacaagtttattttttgaaagaggagaaatatgagtaatgttgtacttcaaagctttttagaaaaggttatagcgaaaaagattttagataagttaaatagtatccgggataatagtaatattaaacaaactcatttaagtacaaaagccggtaagagtgataatgcttttaacaaaatgctgaatgaaatgaaggttcctaaaatatcaacagttttgagatacctcgatgctactaatgagctgctgaaagaaaataaaatgaatgaaataacaatagacgagcttttggatattgaaattctagaaatagtgagaagaacaaataacattacagatggcgattttgacagttatattgaacacaataaggattttttaaaaggtataacgttctattttgaaattatgaaaaagaaaaaaataatgagtattgaagaagaaaaactttatatgaaaattaaagaattataaacagaaatggagactgagatatggcagcagaaagacttatttggttcattacaaggccggaaagggatccaaagtttcacaaggaagccataaaggctttatataaagcaactgatgaattaaaactgacttggtcaggtaatagagaagtacacaaaagatatgaacaagagttagcagatataggtattaaaagacagaatataagtgagagcggatcgggcgggagaacatggatggcattactaaggacttttgcttattgttatttagatgaagagggaaaggttgtactgactaaagccggaaggtctatactaaaagaggaaaaagtatatcaaaatattcggaagcagatactcacctttcaatatccaaatgcatacttcttagaaaaaggatttaaacctaagtttcatgaggactttcaaatacgtcccgtaagatttttaattaaattagttaatcaagaatcgctagattattatgttacaaaagaagaaattacctattttgtaatggtggcccaaaaagataatcaaataaaagaaataacagaaagtattatcaatttccgaaattctagtgttgaagaacaaaataaattaaaacaaaatatagctgaaaagttcgaacatagagagaggtcagataaaggagctcgagatttcaatactgctcattctgatgttgcgcatacttttatgctgataagcgaatatacaggattggtgaaatatgttcgaggcaaagcattaatagttgaaaattccaaaaaagaggaaataaaaaatgagatggaaatattggatgcaaagtatccgtttaataaacgctatctcatttctttgcaaagaatgtttgaaaataacggattagatgttgacagctacaaagcaagctccttccataacataaaacctgcaactaattcattaaaaacaaaaaggaagcttcaaagtattcttaaaaatatacctactccgtctatgcttgataaagaagatcttgttggaattctaaatgaagaatttcctcggagtgatgcagaagagtatgctgatgaaatcctggctgatattcaatataaagccttaaatattaactttgtcgagagctacttaaatgagaacagcgatcatcaatttgaaaaaagtacgggaaacatttttaaagcgttgggttttgaggtcacaatgcatcctaaagctttaaatggggaaagaacagaaattgatattttaatcagttatggtaacgtgtatggaataatagatgcaaagagatacaaggataagtttacattaagtgcttcttttgcctctcatatggcttcggaatatataccaaattataaaggttacgaggataaagaaatggttttttatgggtacgtaacagcatcaaatgaatttagaggtgttaaaaatttagaaaaaataaaaagattaactgaaagaaatcttcagggatactctgttgatggtattatgctgaattctaaaactttattaggattactggattattgtatagaaaatgaattaatgcctgaacaaagagtaagtatttttctcggagcagtaaaaaataagagtttttcatcatttgaacaattactaaaagaagtcaacaaaggttaagagattgaattatgcatttagagtagaaactttaaattatctattagtactatgtttttaagcgtgcttacagagttgtgcttatatttatagagtgcctgaattagaaaaaggaatctgactgcagattccttttccttaaatcatataaggaactttttcctctttaactaactctttaaaagtccattttggctcaatagagtcatattcaataccagcaaacgtttttagtatcgcttctgcaataatttgagcagcttttggagggacagccatgccgatttgctgtcttaccttttctttctttccttcaaatacaaaatgatcaggaaaggtttgcaggcgtgcccgttctctattggttaaggcgcgaggctcttcccaatggtatacgtgagtgccgccgcccccgcttccagtcaccgtataagatggttcatccggatgaagacgtttataaatctgactcattcgggcacctttcactttgagtcgtaattcttccgggatgccctcataccaggcgttctttccgggaggaatatagttcagcatctcaatagttttttgattatgtttcgtaggctcatgattttcagtaaaatcaagaataggcggattattgagtgcgtcgtatgcagtaacatactgattaggagtagtaggagcaggaattttgaattctaaattctggtcttttctgatacctactataataatacggtgtcttttttgcggtacgccgtattcctcaaatttatataagtgaggagtgattgtataacccatccccgcttctcccagttctctcaatatctgaataaaagctttaccttcatttgcactttgcagaccgcccacattttcagcaataaaaaatttcggattatgataattgagcacctttacaccatatgagtaaagagggccgtaatctccgctcattcctttatgttctccaactatactgtaatcattgcaagggaatccaaaggctaatgcatctataggagggaggctttctatatccaattcttgcacaggaccctcaattactgacgggtcatcaatatttttgcagatatttcttctgtatgttttacatgcagattcgtcataatcattagaccactcatgttttatgctgtattcattaccggaactgtcaacgacacgggcacttgtaattcctaaagacagtcctcctggtccgctgaacaattctccttttcggaagatcatataaaaacctccatttgttgatctcatacacattataaactataacacatcttaacgctaaaaagagaacgtttgtttcgcgaatttaaaaggagaaaacttttgttttaatagaagatttaaatgttttcattgagggaaaacttttacaaatcgggaggggaatcgtatggctgacactcatacaaaagaacaaagaagaaagaatatgcaggcgattaaagcaaaatcaaaattagaagataaagtatccgcagccttatggaacagggggctgcgattcagaagaaatgtttcatctctttttggtaagccagatatagctattaaaaaatacaaaattgttatctttgttgattcttgcttttggcacggatgcagctctcacggaaatcagccaaaaagcaacaaagtgtattgggagaaaaaactgaagcggaataaggaaagagatcaaaaggttacttcctactatataaaacatggctggcatatattaagggtttgggaacatgcttttaaagagaattttgaaagaacaatagatgagatagaaacttttataaaaacgaatatgtagataactgattataaattttccggtgataaataattcctttttccttttcatccaaataaacccatagtgtaacatgaaaatagtctataatgcccaaaatttacaagcgaggtgtttacttatactagcagagatgaacgcattacattcggcaagagccgactttgatataaaacaagagcacattcatgccctgaaacaagtcagacatgaaataacaaatttaaaacatgagtttgcagatatcaaccatttgatcagtcagcctcatttatccccgcatacgtggaaagggagccatgcaaaggcctttgaagagtgtcgcgaagatatggcacatgcctgggctgatatcaaaaaggaccaggtgaacgggataattgaacgcattaatgaaaagatttctatattagagggtgacgtgcatacacttcagcacagaatacgatcaattgagaatgagatccgaaaacaaaaagagaagagatgaggtgcgatatgggacaggagatcaagatggatttccatatggtaaagcaggggacaaactgaagctgtatcaagcccatttttgcaaagtgaggttatgccctatgtgtgcgtggcgccggtcgttaaaaattgcttatcataataaattaattgtagaagaagctaaccggcagtacggttgcgggtggatttttctcacgctgactgtcagaaatatagcaggagaagagctgaagtctaagatttctgacatgatgaaagggtttaatcgtctcatgaaatacaaaagggtcgatacagcggtacttggctattttagagctttagagattactaaaaatcatgaagaagatacatatcatccgcattttcatgtgttattgcctgtgaagagaagttattttggcaaaaattatatcaagcaggcagaatggacaagtctttggaaaagggcgatgaaactggactatacgccgattgttgacattcgaagagtcaagggaagagctaaaattgatgctgagcaaattgagagcgatgtgcgagaagccatgatggagcaaaaagcagttctcgaaatttctaaatatcctgttaaggacacggatgtggtgcgtggcagcaaggtgacggatgataacttaaatactgtgttttacttggatgatgcgctttctgcgcgaaggctgatcgggtacggcggcattttgaaggagataggagatacataaagatctgagatctgaaccttgaagatgcggaagacggcgatctggttaagattgatgaggaagacgatgaggtggcaaacagcgcttttgaggtcatggcttattggcatcccggcatcaaaaattacataatcaagtgaaagggagcaggccatgtggcttgctctcttactttgtagaaccgttattcaatacaagcagaaacgatggccgtaatgccaaagaagtccattatcgcctcttttatttcagggctggcttttgaagctgctttggagactgctttgttccaagcggtttttttactgcggtattttttcttgtaataattgtagtactgatatgttttagtgacgaatgtctttactccacccaaggcttttattgcctttttgatctttaacaattttgcaggagcgaaagctaggctggcaagtgcggtaccaacagcacttatacaacctagtacaccttgagtcttgaatggtttgtccgattgatgaagctcagttgcagcggcgttcatatcattgattagcgattgatcatcgatgttatttctgaaccaatctaaaattgcatcagaaccttggttgaccactgagtcaggtatgttttcaattgcgtataatgctttttgactagaaagcaaacttgaaaattctttttcgagattagtgtctcgaactaatgattgattattcggtgattcagcggcttcagcggctgtcgttccaaggattgaaaataaaaacactgaaacaactgccaaaataattttacttctgtactttagaacaaatttcatattatcccccttttttacttaaaaataccttgtaaattataaaccattttaccgcttgattccatagcggaaattgtgtcatgatggatttaggtatataaagtgtttaacagaaagagtgaggggatcagcaatgagtgacaaaaaatatgaatctatacactggtttgcgtcagtactagcgtttttattaataattttgaatagcttttttacaaaaattgagggtgtaactgttggtattgcgattgtatacatagtgatcatgggaattgttaggagtacatggaaaaaagctaaaatagattaagcaggccttcaggcctgtttttttattgcggtgcaaaagagagaaaattgttatgcatgagtgaaaaaataaaaaagtggactcggtgaaagtctccttttttgtaacacgcctgacggaaatcgagagatttagcatgtacacagggttgtgtgtataagtgcgccattttccgtgtgttctatttccaaaattgccactactttttttgtttagtggctgcgatccttttttgtgtctctagcgacttccgtaatgccgcagtgagtgtctcgtgtctttcatgctgtcttttttcgaattgttccatccgttctgccattctttggttgaattcttcctgtcgcttcatgaattccaccaaaggattgtcctgtagcgatgtagcggtatccgatatggtcagttttgaacgatgcaggcttgctatatgctttaccgtttcgtcgaatgagtgtccattgatcttagtcattgtacatagatactctaaagtctttacgtcatcctcggacgataatttgactcccgaatccatcacgaatcacctcgtaaaataggttcgctatggcgaggtcagacacctttaagtgttgcaccctttattatgatttgagttgttttgaaaagggtgcattttaaaaggcgctgcatacctaaacgagaggaaaaatccagtcatgacaggggactgactgggttcttttgtgtttgagtttgttttggaatttaggagcggtccgagtgcccagttatacgcaccaaataaattggagcgtactggcgaaaatgacccgcagggccttttgataaagaggagggggtagtaatgcaagagattgattttgaaatagggatgaaatatgtaagagcaacccttggctttgagggcttagtgctgacggaagaagaggaaaagctcttagaaaggcggtttcatggagaaatcacagaagaagaatacatacgaaaagcgctagagctgtcttattccggtagttcaaaataagggatgtgaagttttcgaggggttgggaaggagccgaaaaaatgaatgttgataagaagagggaaatccaaagaaaatataaagagcaaatgcgaaggaaaaaagtgacctacactgtagaagcagtggttgttactgcgattgttgtgttaattatttttttgaattgcgttattaaaggattttagggaagcaagcgaatagggcatgagtcaacggtaaccggaccgtagggaggattaaggagttgactcactcagcgccacccgaacccttttagaatgaaaaaacgctacggctatatctatgccgaccgcggtaatgatggaaaaggcacgtttgaaagaaaaagaaaagtttttattggtataaagacgtcatcgctacaaacggataaagtctgtaaacgcaatgttccaaagcaagccggcaaaattgacattcagcaaagagaggaggacaataaaagcagaaaggcgggattcatatgtttaaaaaaattcttgcagcagtagacggttcagacatgagcggcaaagctttggaagcagcgatccatctggcgaaagaacagcaggctgaactcaccattctctatgcgggacgtgaagccgttgtctccacatcagccttaacagggattgtctatgttccggaaaacttcattgaagacattaaacatgaagtcgagcaaaaaggagcggccattctggaagaggccaagcagaaagcggctgaaagcggggtaaacgcggaaagcctgtacgtccaaggcgaacctgcgcatcaaattttaaacatagcgaaagaacagcatttcaatctgattgtcgtcggaagccgcggaatcagcggatttaaagaaatgatgctcggaagcgtgagccataaggtctcacaattgtctccttgtcctgtactgatcgttcattaaacggaagaccctgctgatgcggggtttttttaatgagaaagacccccgtctttcgaaaaataggatgaaatcttcctctgaatcaagtaaaatggctgttagtatttgtctgaataaacagtcaatgatatgggggaagcaaatcaatgcaagctgaacaaacatcaaatgccgtcatcaaaatggtcatttccatggtcattttcggatcaatcggctttttctcggaacatacgaatgtgccttcaattgaactggtctttgtgagatgtctgtgcgcctcattgtttctgggcgtttgctggtttggttccggacggcaccgcaccgaacaatggaaccggcgtgaggtgctgcagacactggcctgcggattttttctcgtgctgaactgggtgtttttatttaaatcatttgaggagacatcagtgacgatagcgatttccgtttatcatttggctccggttctcgtccttcttctagggagccttatataccgggagaaactgcatattgtgtccgtcacttccatcgtgatttgttttctgggcaccgccctgatttccggcatcaacggaaatacatcattttctcagctgatgggatcgggtattatttgggccgtgctggccgcccttttttacgcttttacgacactggccgggaaaggcatcaacagcctcagcccatacgccgtcacctgtttgcagaccggattgggcgttatcattcttctcccgttcgtccgtttcggcgctttttctgatttgtcgcatgtgaactggatcatgattgtgtcaaccggtatcattcatacgggaattgtgtatttgctcttttttgacagcttgcggtttttatccacccggtttatttcaatcatcgtatttcttgatccggcggtggcgattgtgcttgacaccgtatttacgggatttcgccccgacctttatcaatctttggggattgtattgatttttgcgggaatggcgctgtccctgattcgaaagcaaaaagccgtgccggcggaaactcaggcagacagcacccgtatataggcggccgtatcggctgctttttttgttttggggcttttcagccataacgaaaaagcagacaaacagatcatggaaaaagaggatggtaattgtataatacttcttgtgcttacaatttaagagattaaaggagtgaagggcatgataaagaagacgcgtcatctcgctttcttggctgcactcggctttgcgctttgtctgaccatcgtatgttccgtatcaaaacaggcagaagcggcagcagcttatccggatgtgatgcagggacttaccggattcgcgggaaatgcgaaggatcataacggaaaagcaaaatccgccgtatcgggaggccagggcggccccgtcgtctacgtcagcaatcttaatgatctgaataacaatgcgggcggaacggaccgcaaaaccatcgtcatcacaagtgatatttcttccccgggtaaagccgttgtgacagtcggcgccaataaaacgatcgtcggctcttataccagccacaggctgaccaacatctatctgaccaccggctccggctcaaacaatgtgattttcaaaaatctcattatcagccatagtgccgccattacgggcaacaacgacattccggtgtacatagcgaacggacagaattactggattgaccacgtgtggtttgaaggacacagctacaatccgaacagccacagtgatttgggaaagcttctgtatgtcggcgctaaagcggattttgtgacgctgtctaactctaaattcacagaccatctgtacggcctgattctcggttatccgaatgatgataacgaagggcgcaattatatcggctatccgcatatgacgatcaccaacaactattttaataacgtctatgtccgttcaccgggcctgatgagatacggctattttcatgcgaaaaacaactatgtgaccaatttcaatttaggattcaccattcatacaaacgcgactgtcttctcagaagccaactatttcggtaacggaaatgaaaaaggcggaatgatagacgactacgggacggcccaattcaccgacatcggttcattcccgtcgctcaaagccccgaaatcaccgcgcaccggctggaatccgagatcaaattacagctacggcaccctttcagcccaggacgccaaaaacttcgccaaatcctatgcgggagcgcaaaatacaaatctccgctatccataatacgaaaaaccgccggcagccggcggttttttttatgataaaaggttagaagttccagttatatctaaaataacctttaatgtctacttgtattatggatttgtattacaagtggggtatctgtgaaattttaaaaaagaacaagtgaaaaagcagtcccccgaatggcccggcaaaacgtcagggtaaagcggcggcatttcgcgtataatgaagggagccggacagagaaggagtttagtcatgaatgagtttaatgaatatgcgatcagccccgagatccgacgggcgctgaatggcttgcaatacaccgagccgactgaagtgcagcggcgcgtcatccccgccgcgctgcaaaaaaaagacctcgtcgtcaaatcgcagacgggcagcggcaaaaccgcggctttcggcattccgatctgtgagcttgcggagtgggaggaaaacaaaccgcaggcgctgattttaacgccgacccgcgagcttgcggcgcagattaaagaagatatcacgaatatcggccgtttcaaacggataaaagccacggcggttttcggaaaagcttcttttgacaaacagaaaaccgaactgaagcaaaaaagccacgtcgttgccggaacgccggggcgtgtgcttgatcatatagagaaagggacgctgccgcttgaacggctggcgtatgtagtgattgacgaagcggatgaaatgctgaatatgggatttattgaacaggtggaagccatcattcagcatctgccgaaaaacagagtcaccatgctgttttcagcgacgctgccggatgacgtcgagaagctgagccgcacatatatgaaagaccctgaattgattgaagtaaaagcggaaggcctgacgacaaaagacattgagcattttgtcaccagaacagaagaagaggacaaaacatccttgctgcgagatgtcctgatcaccgaaaacccggacagctgcatcatattctgccggacaaaagaaagagtcatccagttaaccgatgagctggacaggctgggctacccttgcgataaaattcacggcggcatggtgcaggaagaccgctttgacgtcatgaatgaattcaagcgcggcgagttccgctatctcattgcgaccgatgttgccgccagaggaattgatattgaaaacatcagcctcgtcatcaattatgatattccgcttgaaaaagaaagctatgtacaccgcaccggcagaacgggccgcgccggacaccgcggactggccgttacgtttgtgacaccgtctgaatcgcggtttctgaatgacattgagacatatatcggtttccgcatccagaagcgggaggcgccgtctgagaaagaaacagcggaacggaaagcggcttttgcggaaaaattgaacgcccgccccgatgtcaaaacagacaaaagcgaacagttaaacaaagacatcatgaagctgtactttaacggcgggaaaaagaaaaaactcagagcggtcgattttgtcggaacgattgcgaaaatcgacggcgtttcagccgatgatatcgggattatcacgattttggacaacgcatcgtacgtcgaaattctgaacggcaaaggcccgcacgttcttgacatcatgaaaaatacgacggtcaaaggcaaaaaactgaaagtccataaagccaagaaataaaaaaaaagcctgccgcgcgcaggctttttttacgtcgtctcctcaggcacgaacgcaaggatggcaatgccgatcacaaataacaaaatcaggctgaacacggcggctgacgaatttccggtcagctgggcggtcacggcaatcaaaagagggccgataatcgaagcgaacttgccgaagatattataaaagccgaaaaactcattggcgttctgtttggggacaagcttggcaaagtaagagcggctcaacgcctgaatgcctccttgggaagtggcgacaagcatagccaagacccagaaatcaaaagcggaatccataaaataagcatacgtgcagacaatcatatacacgccgattccggcataaagcatcgtttttcctttaaatcgttcggccagccgtccgtacaaaatcgaaaaaggcgcggcgacgacctgagtgacaaataaaacaatcagcagatttgccgcgctgatgccgaggtcagccccgtatgacgtggacatcgtaatgatggtgccgaccccgtcgatgtagaagaaataggcgagcagaaacaaaaacagtgcccggtgcttcctgatctgcttcagcgtgccggccagccgtataaaactgctgaatacaagccgcggctccctctcgatataatagcgctggcggacgcggagaaggagcgggatcgaaaacagcccccaccatgccgccgtaatcaaaaaggcaatgcggccggcagcctgggcggacagcggaatcacctccgcttgggctgaaagaatgacggcaatgctgaggagaaaagggatcgtgctgccgatatagcccagtccaaatcccctggcggacaccatattcatccgctcctttgcggccacatcaacgagaaacgcatcataaaacacattagacccggcaaagccgatcgtggaaatcgtataacaaattaataacagcatccaagattcgccgggaatcaaagccagcgcggctgtacccgccacaccgatcagaagaaagaaggcaaaaaaccgtttcttgcatcctttgtagtcggcaatcgttcctaagacgggaccgagcatcgccaaaataaaagtcgcggcggcaatcgtatagcccaaataagcggtggaatcagccgcgctgacaccgttttccgccgccgcggctttaaaaaacaaggggaaaacagccgtcataataatgaccgaataagctgaattggcccaatcatacagcatccagctgctttcttctttcgaaaaccgtttcatcacacacgctccttcccaaaaaacggttctctgcattatatgcgcctcatccgcatcgttggacaaagatttctgaacggcgttttctgattgacctggagatattgaactactttaaatgtgtagcaggtaaatggtcaggcgggagggagacagaattcaagattgcgaaagtcattaataatgtcgtcagtgtgctcaaagaaggcaatcaggaattggtcatcatgggccggggcattccattttagtttccttgtatttattttgtcttacattcacatatgacttggttaaggcaggcaaaacctaaattacaatgagcgcagatcatctctgtttgtgctgatggtaatttaggtctttttaagtttcgtttttatcattattctgactgatgttcccttttacagaatcatgtatgatcgataaagaaatcgctttcaaagaaaggggaatgccaacatgttttatcgtatgaaacgagtgctgctgcttcttgtcactggattatttttgagtttgtgtgcgatcacttctactgcatcagctcaaacaggcggatcgttttttgaaccttttaacagctataactccggattatggcaaaaagcaaatggttactccaatggagatatgttcaactgcacgtggcgtgcaaataatgtgtccgtgacgtcatcaggtgaaatgcgattggcgctgacaagcccgtcttataacaagtttgactgcggggagaaccgctccgctcaaacctatggctatggactttatgaagtcagaatgaaaccggctaaaaacacagggatcgtttcatcgttcttcacttatacaggtccaacggatggtactccttgggatgagattgatatcgaatttttaggaaaagacacgacaaaggttcaatttaattattatacaaatggaaagggaaatcatgagaaggtcgcggatctcggatttgatgcggccaatgcctatcatacgtatgcgttcgattggcagccaaactctattaaatggtatgtcgatgggcaattaaaacatactgcgacaagccaaatcccgacaacaccgggaaaaatcatgatgaacttatggaatgggataggtgtcgatgactggctcggttcctacaatggtgtaaatccgctatacgctcattatgactgggtgcgctatacaaaaaaataatgtaatgtacagaaaaggatttccgccatcggaaatccttttttaattaaaacgaaataatcccaatcaaaagcgccgcaatcgtcatcacaatcgttgtccccacggcccatttaatagtgaatttttgatgatcgccaaagctgacgcccgccattccgaccagtagataggtggatggcacaagcgggctgagcagatgcaccggctggcccagcaaggaggctcttccgatttcagcggcgtctattccgtaagcggaagcggcttcagcgatgatgggaagcacaccgaagtaaaaggcgtcattcgacatgaaaaaggtgaaaggcatgctggcaatcgcagtgatcaacggcagatgcgggcccatggcatcagggatgagggaaacgagagaatgcgccatcgcatcgaccatttttgtgcctgagagaatacctgtaaatatgcctgccgcaaacaccattgagacaacgtttaacgcattacccgcatgtgccgaaatccgtttctgctgctctttgacatttggatagttgatcatcaaggcgatggcgaacgcaatcataaaaagaacagggagcggcagcaggctggtgatcagcgcggccatcagagcgacagtcagcagcaggttgaaccattggagagcgggacgcttcagcggcgctgcctccggatcagaagacggcgcgtgttcaatcgaaatgatgccgagccgcttccgttctttttttccgaggagataagcaacggcgatcacccagagaatgccggcgatcatagcgggaatcagcggcgtaaaaacttctgacgtgtccaatttcaaggaagccaaaaccctcgccgtcggcccgccccacggaataatattcatgacccccgaaccgagcatcgcaattcccgccagcaccaaacggttcatgccgagccgtttgtaaaggggcagcattgccgcaatcgtaatcatatacgttgttgttccatctccgtccagcgaaatggtcatcgtcagaaccgctgtgccgatggcgatttttaacggatcccctttgacaagcgataggattttggcaatgaggggatcaaacagacctgagtcaatcataatgccgaaatacaggatggcgaataacagcatgatcccggttggagcgaggtctgtaacgccttgaatcatcatctcgccgagatctttgccaaatccgctgatcagggcaaacacaacaggaacgacaatcaaagcaataagagcggaaagccggttagacataataagatacataaagacaatcatcatcacaaaaccgagtatggcaagcacgatatgacctcccctgttcaacagctgtattggtaagcgctttcacgatttatttctgtgaaaatggcttatttcaaaatgtgtatgaccgcatatgtaaatacagacctaaaatcctaatgagcggatcagcagtttatatgaagaacgccgcgggtaaatgtgctatagaatgtttcgttttaaaagggggaactgacatgagtgatgatcaaaacaaacgagtaaatgaacactcaaaggacgaacagctggagcagtaccggtctggtaacagcggcaaaaaaatgacgaccaatcaggggcttcgcgtgtctgaggatgagcattctttaaaagcgggcgtccgcggccccacgctgatggaggattttcattttcgtgaaaaaatgacgcactttgaccacgagcggattccggaacgggtcgttcatgcgcgcgggtacggcgttcatgggcattttcaggtgtacgaaccgatgacggaatatacacgggcgaaatttttgcaggacccgtccgtcaaaacgcctgttttcgtccgtttttcaacagtggcgggttccaaggggtcagccgacaccgtccgtgacgccaggggatttgcgacgaagttttatactgaagaagggaactatgatctcgtcggaaacaatattccggtgttcttcattcaggacgcgatcaaattcccggatctcgttcacgccataaaaccggaaccgcacaatgaaatgccgcaggccgcgacggctcatgatacgttctgggattttgtcgcaaacaatcctgaatccgcgcacatggtcatgtggacgatgtctgaccgcggcatcccgcgaagctatcggatgatggagggcttcggcgtgcatacgttccgtttcgtcaacgagaaaggaaaagcgcgctttgtaaaattccactggaaacctgtgctcggcgttcattccctcgtatgggatgaagcgcagaaaattgccgggaaagatcccgatttcaatcgccgcgacctgtgggaaacgattgaaaacggcggcaaagtcgagtatgagctcggtgttcagatgatagacgaagaagacgagttcaaatttgattttgatatccttgatccgacaaaactgtggccggaagaattggttcccgtcaagctgatcggaaaaatgaccctcgatcgcaatcaggacaatgtctttgcggaaacagaacaggtcgcattccacccgggaaatgtcgtgccgggcatcgattttaccaatgacccgcttcttcaaggccggcttttctcttatacggatacacagctcatccgtcttggcgggccgaattttcacgagattccgatcaaccggccggtctgcccgttccataacaaccaatacgacggctaccatcggatgacgattaataagggccctgtcgcctatcataaaaattccctgcagaacaatgatccgtcgccggcctcagaagaagaaggcggatacgttcattaccaggaaaaagtagaaggcagaaaaatccgccagcgcagtgagagtttcaatgactatttttctcaggccaagatgttctggaacagcatgtctcccgccgagaaagaacatatcatctccgcgttctgttttgaggtcggaaaagtgaacagcaaggatgtgcagcagcaggtgattgatgtcttcagtcatgtcgacgcagggcttgccgagtgtgttgcgaaaggaatcggcgtgaacccgccgccgaaggatcgtgaatctgacgaaacgttcacttccccggccttaagccaggaaaacacggtgaaaacggcagcgacaaggcaggttgcggttttaaccgaccacgggttttctgatgagaaagtcaaacaagtgcttgacgcatgcaaacaggcgggagtcagagccgatatcatcagccccgcgctgggaactatcaagggagaaaacggtacggagctggaagcgtcagccactttcctgacagcggattccgtcctgtacgacgctgttttcattccgggcggaaaacaaagcacagacagcctcaaagcccaaaaatcggccagagacttcgtcagcgaagctttcagccattacaaagcgatcggcgcctccggtgaaggaaaagaacttctcgccctcgccgccggaaccgaaagcggccccggtcttgttccggacggaaactgcgaacaatttctgaaagccgtggctgagcatcggcattgggacagaaacatataagaatgaaaaagcgccttttatgaaggaggcgcttttttcttgtgagagtgaaatatctgaggagaaaacgaaaatgcttccgtgcaaatccgtaccttccgctgtccgggacattcagacaacagttttagagagtcagggcatgcgccatttaaagcaggcgggttgatgaaataatatgtttcaccctctttggtttacttccgctctgtgtttgtgtatcttaggggtagattttctggaggagcgaatgatagtgaagccgtttaccgaaaaacaacttgaagaatattaccggcgtgacgaaaacatgatgattttggtgtttgcccaatggtgcgtcaatcatgaccttgatccgatggccatttacagcaaggcttatcccggacagcctttaaacgaagagctgcgaaaaacggctgaagaacttgtcgtgccgaaggaggaatcagaaccgattcctgatcaaactgtcatcggcgttttggagatgttcggcaactccgatttggcagaagccgtttatgaagccattgcgcaaagaccttcacggtaaaagaggcgtggattttccatgtctcttttttttatggagaaaatgtgaaagaaggcccagaaacaatttgctgatccgcgctgtctatagagtgtaacccgttttcaaaaagggaacggtaatgaaaaggaggagttgtgatgaaaaaggcattcaaaatgatggcggccgtgctcttaaccgtgctgacagccgcgccgttcggaggtttcgcgccttcagccgaggccgcgcaaaccgcaaagcccgttgtcaaaagccatacgtataagcatgtaaaacagctgacataccccgaggtcacaaatacgggaaacgcatcttttgaaaagaaaatcaatcaggacttcaaacgttatattgaacaatcgtatcaagaatatgtgaaaaacaaaaaagacggtgaaaaacaaggctacaaagcggaataccaggcagatttcaaggtgaagtataatcaagacggcaagctcagcattcagacggaagactacagttacacaggcggcgcacacgggctgacatccgttcagacctttaattacgacttggccgcaaaaaaacgggtcacactcaatgatgtgctgaatacaaaaacgaaagctaataagacgagagactatctttacggctacatcaagaaacatgacgatctgttcgatcaggacgttaaaaaacaggagatcatcctgaataacgaaagacctttcttctttacgaaaaacggcattgccgttgtgttcggacaatatgatctcggaccgtacgcggcaggaatccgggacgttttcgtacctgcatccgtctatcaataaaaaaaagcgatatcactccaaaacggagcggtatcgctttttttcttttaccagacaaacaatccgacaatcgccgcgctcaataaggaaacggcaattccgctgacaagcagcttccagacgttttttccgatgatggctgatttttcaccatcaagcagagattgataagatccgtagatcataccgatggtgctgaagtttgcgaatgatgtcaggaatgtcgtagccacggcaatcgtgtgcggcgggagtgaattcagctgccctttcagatcggccattgccacaaattcattcgtcgcgagcttgatgcccatcagctgtgcgacatacatcgcgtcatgtacgcctaatccgagaaggaaggcaaacggactgaagatgtatgagaaaatcttttgaatggtcaaaccgtgcacgaacagtccgagtacgccgtttaacgcggccgttaacgccacatagccgattaccatcgctaaaatgacaatgaccatgttcatgccgacaagcatactgttagaaatcgtggagaagaagtcttttttctccgcttttgaaggaacgtaaataatatcatcctctttagaaacgtccacaggattcagcatattggcgattaaaagcgcgtttaagcaattcagcgggatggctgtaaacacataagtggacggaaccatcgtcaagtacgatccgatgatcgagccgctgatgctgctcatgctcatcagcccgaatgtcagaagccggttgttgctgacggcggcaagctgctggcggatgacggctaaagcttccgtatttcctaaaaacatcatctggatggagaaaaagctctccagtttcggcagacgggatattttagaaatcagccagccgattttatcaatgagccacggcagaataccgaaatacgacagcatatcaaagaaggtcacgacgaagataatcggcagcaatgcgctgaagaaaaaatcaaccgtcgggttcgccatgacagacggaaaagcgaacgcaatcccttgactggcgcaggaaatcagccatgtaaagaacgcgccgatcttcccgatgacaaagccgccgatttttgtccctaacataaaccaagtaatcagaaactcaaagacgaggagcatgacaatcggacgccatttaatcttcttcttgttgggagagcataagaaaacaacagccatgacaacaatgagaccgacaatgttcaataaaaagtacatgtgagcaactcctataagggtattatggaaataaaaaaagctcttattcgtcacaaattcctgaaagccagaaagtgtgataaataagagccaaaagaaaagaatagacagcgtcatatgcttttcactcgttcaaatttatgcaaactttcttgtagtctagtcttttacggcactaggtagaaacaatcagaccatattactgatcatatacaagaataacgatattacatgagatagcagtattttatcgtttcaatttttgaaaatcaacctttttagatattttcaaaataataaatttatattataaataaagaaaataaaggatgtctataagtaattggataataaaggtgtaaaaaactcctaaaaaccgttccggttcattgtaaagacgggatgcagctgataaaatggatctgagggcacagccttcaaaagacggcagaaaaggggtcattttcgtgatcatccaattcattcgttacagataatgagaggtatagataaataggtaaaaccttccaatttggcaaggtttatttgtctatgcctttttcatttcatcggaataacgaatgaatgaggtgttttttttgacgtctataaaaagaaaacgcgcggaattactgcaatcatgccaatccgtgttcaggtgtccgctatgccggtcggccatggcggtctcacgataccgaagcttgatttgcggacaggggcatacatttgatatatcaaagcagggatatgtgaatttcctcaataaatcggtcaaaacccgctatgacaggcagctgttcgaagcgagacgcgagctttttgacagccgggaattttttgggccggttcaaaaggagatcgccgccgtcatcagccgtaagcaatctccgcataaaccggcggcgatattggatgcggggtgcggagaaggctctcatttagccgccgtatgcaaattgcttcagcccgctttttccgtgacgggaatcggcattgatctctcgaaagaaggtgtgctgcatgccgcaaaggccttcgggaatcatttggtttttgccgtcgctgatgtggcggatgcgccgtttgccgacagctgttttgatgtcgtgatgtctgttttatcaccttggaattacaaggaatgcagcagacttttacgaaagggcggcacagtcattaaagcggtgccgcggcgtgattatttgaaggaagtaagggaatttttcttcggagacagccctcggcggaaagacaccgccgattctgcggccggacgattccaagcgggctttcaaacctttgagcgcaaacggctgtgttacacgaagaccttagcgcagcctgacctcgagcggcttgtgaaaatgacgcccttaacatggaaatgtactgatgacagcatccggcggtttatcagccggaaagaggctgctgtcacgatagatatcgatattttaatcgggaccgatccgctgtaaaacggaaaagacacgctgatcgcgtgtctttttttttatttccagacttcaccggcaatgttgacgacatggcgcagtttcgcccattgctgttcttctgtgatcaggtttccttcctcagtggaggcgaatccgcattgcgggctgaggcaaagctgatccagactgacatattgtgaagcttcttcaatccggcgtttaatcgcgtccttgtcttcaagttcgccatgtttcgacgtaatcaatccaagcacaagctgaagatcagagcgtttgacataacgaagcggttcaaagccgccggagcgggaatcatcatattccaggaacaatccgtcaagatcaagcccgtcaaaaatcgtttcagccgctgcatcatagccgccttcagccgtccatgtggattggaagttgccgcggcagatatgcatcgtaaccttcagatcgtcagggcggtccttgatggcgtcattaatggaagctgcaaacagcttgcgcagctcatccggcgttgtgccgaaagcttcaatctgacgaagccccgcttccgataagaaaacggcccatgcggtgtcatcgagctgaaggtagcggcacccggcgtcatagaaagcttgaatcgcttttttatacgcctttgacacatcgtgctgaaattgtttgtaatcattctggtaggacgctttttccaattttccgcggaaaaacagcatattcggactggggatggtcattttcggaacagcatcgccggcaatgctgtgcaggaatttataatcttcgagcatcggatgctgagaaaaatcaatatctcccgttactttaatgccgcgcgctttcgtctgtacgttgtgaaactgaatgccgctttcaggcgtaaatgcctcaaccccgtctaaattttcgagaaaatcaaaatgccaccaggcacggcggaattcgccgtcagtcacgacattgaggccggtttctttctgcttttccacgctgcggatgatttctctgttttcgatttcgcgcagctgttctgctgaaatctcacctgccgctctttgcaggcgggcttgcttcacagccgccggccgcagcaggcttccgacctgatctgcgcgaaacggcgggttttttcttagaagagtatgcaatggttgttctgtgttttgctgtgacatgaacgattccttctttcctgatgaaatataaaaaaactcttccctcggatagggaagagcttgcgtccgcaaatctcaaccttatcttcaggatttagcaccattctgctgaacagcggttgccgggtatcatagggccagtccctccacctctcttgataaggaaatatgctatttttcagaataaactgtaatactctaatcttagtatgttttctcatattgtcaatatatttcgataaatatttttatttgtcaccctcaaatagaatcatatctatcacgatggcgatcgcaagacaaagagcaatatcctcttccttttcaatctgcaaatgataggaatcgccccagctcatccatgatttggtgacggtcatccggtttgattttccgtctgtcacttgaaaattccgcccccacacatcgccggtaaggtcccagccgaccccggaaatttcaaatttcggtttgaaaaacgtgactttcttgatgacttggcagacgggtttgccgctgacggaaatctcgtaacggggaacgagcgacatcagtttctgattgacgctggcgagcgtgcggccgtccaaatcagtcagcttcagttcatcaccgaatgaaaacagctttccttcaacattgtagacttcttttccgctttcaagaaacacttgaaaacgattcttaaacgtaaacattcgctctttgatgtaaaaatggtacataaaaaaactccttttttatgttgtacgaaaaaaggaggcggttggtttcatatcggccgggtgcataaaaaaaaggctgccgattttgcggcagctgtcgtttttatgatagcggcatccggcgtttttgacggatcgcatttaaatcaatgatgttattcgtgtcggcagctgtcaccagcgggcttgtctttggcgttttccggcggttgtccttactgaaagagaaaacaagataccctgtcaaagcagcaaaaataagtagcatcattttacatacctcccaaaaaaagttttggtattattattgtacgaaaaaacaaacgaaaagtattcaaacaattgtcacttttttaaaaaataacgtcattttccgtaaaaataactatgggttgaagaaattttgctcttgttgtggttctatagattgtatcggctgatggatgatgatcgtttatataactttttcactattttttgtaagtgtctaaataactatttcagtgttttcgtttgccttgtgttattcagtaccctaaaaaaccttataatatgcaaaataactgcttctaacagatgactgcgagttgacagcgctttctttatttttttaaagaaaacgagatgttatcttaaaaaaatcgtttgaacattttccgcagttttttaaaagggtttgattttgtctccagaacacgcgggtcttttaaggtttttttcaattctttcgctacagtccctcttgccatagtcttcactccttctttccaattcataccttatatacggaaagaaagaaggaaaggtttcatgtgaaagaaaaaaaccaaagcatggggctttggttttaagcgcgctcttcaaagagcctggcgatttcaacaatgacgtttaccgccttttccatatgatcgacggaaatgtattcatattttccgtggaagttttggccgcccgtaaaaatgttcggtgtcggcagtcccatgtaagagagctgtgatccgtcggttccgccccggatcggttcgataatcggttcgatgtcgaggtttttcatggcttgataggcgacatcgactatctctttgaccggttctattttttctctcatgttgtaatattgatcacgcagttcaagcttgatgctttcgttgccgtatttggccgccagcgcatcggcggttttctgcatatattcttttcgttctgcaaagcggtctctgtcaaagtctctgatgatgtacgacagggcggcttcagaaacgtctccgttcatggaaagtaaatgatagaagccttcatacccttccgtatattccggcgcttcttctttcggcagcgcgtggtgaaattccatcgcgatttttgaagcgttgaccattttgtttttcgccgttcccgggtggacgctttttccgtaacaagtaagctttgcggctgctgcgttaaagctttcatattgcagttcgccgagggggcctccgtctatcgtgtaggcgaatgcggcgttgaagcggccgacatcgaatttgtgagggcctctgccgatttcttcatcgggcgtgaacgcgacccggatcgttccgtgtttgatgtccggatgtttgatcaagtacgccattgccgtcatgatttcagcaatgcccgctttgttgtcggctccgagcagcgtcgtgccgtctgttgtgatcagcgtctggcctttatagcgggagagctctgggaattgctcaggcgacaggacgacattgagtttgtcattcagaacgatatcatgtccgtcgtagctctcaataatctgaggattcacattttttccggtaaaatcggtcgcggtgtccacgtgagccagaaaaccgacagtcggcacgtctttatccgtatttgccggcagagtcgccatgacgtacccattgtcatcgactgtgatgtctgtcatgccgatcgactttaattcatctgccagcatgttggccaatgtcagctggccgggggttgaagggcagttttcattgttttcgtcagactgtgtatcgacttttacataagaggtaaagcgttcaatgatttcatttttcataccgtcatctcctttgtcttatcttaccatgcgcgggggagggatttctatttcgcaaccgttttgaatcgagggctctgttttttacgcgaatgaaaataaattatgaagaaacgatgactaaacgattaaactttttggaaatggatgattgaggaagaaaaaaccgatataatatggtcaattcattcaataggggaggctttcttcatggcgattttagtgacaggcggagcgggttatatcggaagccacacatgtgtcgagctgttaaacggcggctatgacatcgtggttttggataatctgtcaaatagttcaccggaagcattggagcgtgtgaaagatattaccggaaaagggcttgtgttttatgaagcggatctccttgaccgtgacgccgttcaccgggtgtttgctgaaaatgagattgaagccgtcattcattttgcgggattaaaagcggtcggtgagtctgtggctgttccgcttcgttattatcataataatctgacggggacgtttattttatgtgaagccatgcaggcacacggtgtgaaaaaaatcgtcttcagttcttcagcgacggtttacggcgttccggaaacaacgccgatcactgaggattttccattaagcgcgaccaatccttacgggcagacaaagctgatgctggaacagattttacgcgatctgcataaagcggactctgaatggagcattgcgctgctccgctactttaatccgttcggcgcgcacccgagcggccggatcggagaagacccgaacggcatcccgaataatttaatgccgtacgtcgcccaagtcgctgtcggcaagcttgagcaattgcaggtgttcggcaatgattatccgacaaaggacggcaccggcgtgcgggattacatccatgtcgttgaccttgccgagggccacgtcagagcgcttgagaaggtgctgaacacaacaggcgcggatgcctataatctcggcacgggaagaggctacagcgttcttgagatggtcaaggcgtttgaaaaagtatcaggaaaagaagtgccgtaccgttttgccgcccggcgcccgggagacatcgccgcatgcttcgcagacccggcaaaagcgaaggctgaattaggctgggaagcaaagcgcgggcttgaagaaatgtgcgccgactcttggaagtggcagtcctccaatgtgaacgggtaccaaaaggtgtaaaaagaaagagaccttcaaatgatgaaggtctctttttttacggtcattatttaattttcacttcaacatcgttgctgaactttaatttccaagtgcctttagagtatgcgtttttatcaacttcaaaagcttttacgtcagtaactttaatgttcgggttcaagtcacttaaaattttactgttgtctacttttgtttctgttgcatagcttgaagaagcatcaatatctgaatcataggatgttcctttagaatctactaatttcgctcttggaatggagaaagagcttaacggcttgtttgaaacatttttaactgtgtattgaacagctacgataacgccgccgtcagacgcttttttctcgacaaattgagagcctactgaatctcttttttccactttggtaacggtaacttcagttttctcagtcttaacagtgtcaccgatgttatacagtttttccttggattccgcagcttttgaagacgcggttttagatgatgaagatccgcctccgccgccgatgtttacgagaatgataataaccactaccgccagaagcaatgtgataattttatgtctcataaaaaagtttctctgatctttaccgcagtttgggcattttttaacgcctttagcgatttctttgccgcatgccttacaagacaccaggttgcctgccataatatttcctcctatgtaaactatttcttaaaaactacatactataatgcctgtaaaataacctatagtcaataatattttgagaaaaaaagtattttaatgattttttagtcatgtattttaagggccttttttagtatcggcagatcgttcgaattttttatatgtttattgaaaaaaagagtggttgaacatgttcgtgatttcccgtataatcttgaaagatatacaaaaactgaacataaaaaacagcggttttctagggttccgcaatgctgaat

SEQ ID NO: 23 - DNA, 11174 bp, Bacillus amyloliquefaciens
gctctgctttttcttattttctccgcatatgatgaatatatagacgttcacccacaccaagtgaggctcgcgtacatatgttgttaaagacaaaagtcaaataccctaaaagaaggagctgaaatccatgagctgcggaaaacaccatggccgagatgaaagttgtgtatgcgatgcagtcgagaagattttagcagaacaagaggctgttgaagaacaatgcccgactggatgctataccaatctgttaagcccgacggttaccggtaaagataccatcccgtttctcttgtttgataaaaaaggcggtttgttctccacattcgggaacgtcggaggctttgcggatgacagccagtgtttcgagtctattttcttccgggcagaaagagtttgtgattgctgcgcaacgctttcagtattgcgccccgtagatgtgcacggcgacaccctcagcgtctgccatccttgtgacccggatttcttcggtttagaaaaaacagatttttgcattgaagttgatctgagctgcttcagcgccattcaatgcctttcaccggagcttgttgaccggcctgcgccgcacaaagagaaaaagcatcacggatagtcattgattcgcatctttcctaaagaagaatccccttccaaccttctattacagatgcaatcatcagcccgcccggacttccgggcggctgactctccgatatcgtttaatccggtatataaaacgtgaagtcaggagggatattatgagcaagcatacaacatactgtgtgcgtgaagcggtagaaaatattgaagacctgcaaaatgcggttgaggaagattgcccggccggatgctattccaaccttttatcgccgggtttttcattaggcgatacagtgccgtttgtgcttttcacttctaaatcatcaccgtttaccgcattcggaaatgtcggcgagctggataacggtccgtgttttaacaccgtttttttcagagttgaaagggtctgtgacggctgtgccacattaagtctgcttattgcttttgacgagcataagcacattcttgattttacagataaagactctctctgcgatgtattccgtttagaaaaaacgaactattgcgttgaagtcgatctccatagcttctgcgccatcaattgcctgaacccgagactgatcaaccgcacacattcttaaatcaaaaagcataaaaataagctgccggattaaagaattcaggcagctttttgtatggttaaaatccaagcggatgcagcgaggtaatatcgtctattgcgagttctgccggcgctccgttgcttgtcgtccgcaggaagatcgcattattttttctgccgacgattacgcctctgtaggttttcccgttggcttctatcagacaaagggtccgcggcatattatgcggcagcttcgttaagaaatcaattttttcaagaatggacattctgctcatcggctttttcacgcgctttggcggaaccttttcctctggggcggcattgtgaaccgcttcaggctctttttcaacggcatcaggctcttttttagaggcgtcaggcttggcagtgtcctgctccgcttgcgccggaacttcttgaacggcttcttctgcgcggctgtgctgttcaggtacttgcttttctggttcgacagccactgctccttcaggctgagttttacattcttcctcccgctttccatacatcggctcttcttccggcggctgaggcgctttcctttttttgattaatatgtcctgcattgatgattgcgtgtctgaataatccgcctgaacaatatacatgagcggttttttttccgcgtttctgttttgttttgacatcttcatccctccgattctgtcatgttttatttatatgacggaatgattaaaatcagaagaaagaaaaaagcaatccctgaaagggactgcttgttatttaacgtgcggtaatatggaatcctgaatcaacgtgaagattttcgcccgtgatgcctcttgacaggtcactgaacaagaatgcagccgtgtcgcccacttcttcaggtgttgtcgtgcggcgcagcggcgcgcgctcttcaatttctttcaggatagagttgaaatcactgattccttttgcagacagcgtacggatcggccctgctgaaatgctgttgacgcggatgttttcttttcctaagtcagcggctaaatatctgacgctcgcatcaagagacgcttttgccacacccattacgttatagtttgaaacgacgcgctctccgccgaggtaagtgagtgtaacgatgcttccgccttcagtcataatcggacgcgccgcttttgcgactgctgtcagagagtaagaactgatgttatgcgcaagcaggaatccttcgcggttcgtatttaaatattcgccgacaagctcttctttgtttgcgaacgcgatgcagtgcgcaatgccgtgaatcacgccgacctgctctttaatgctcgcaaagcaagtttcgatctcagcgtcatttgtcacatcacacggaaggatgatggaatcatttctttctaatgtagccgcaaggtcatgaactgatttttccaagcgctctcccgcgtaagtgaaaatgaggcgcgctccggcttcatgcagcgaacgggcgattccccatgcgatactgcgtttattggcaacgcccatcacaacgatgttgcggccttcaagtgagaaattcatatgtataaagcctcctgtaatcgtcttaaagacatagttttagtacctgatcttaatttttatcatatcataaccttgtccagattgaaagcatgggaaaaagaccgcggatgttgaagcggtctcttttttatctcgtctgcagactgttccttttaaaggcaaaatgattggtcgggccgtgtcccgctccgatgccgagcgtatgttccacggcttcccgcacaaaattgacggctgtctcaaacgcggtctgaatgtttttcccctttgccgtttccgccgtcagcgcggctgcgaacgtgcagcctgttccgtgggtgtgtttcgtgtcaatataagcgtggctgatttgggtaaaagacgaaccgtcaaataataaatcaacgattctcccctgttcaggctgatgtccgccttttatgatgacatgctttgcaccaagcttgcaaaggcgttcggccgcttttttccggtcctcaaacgtgcggatttccattcccgtcaatacctcagcttccggaacattcggcgtcaccgcatagctgcgcggaattaacagctcttttaacgcggcctgagattcctcacgcagcagggaagcgcctcctttggcaatcatgacggggtcggtgatgacatgatcaagcccgtactgatccgttttttccgcaatttccgcaatcatttccgcgctccacagcattcccgtttttacagcgtcaggccgcaaatcttccgccaccgcgtcaatctggctgcccagcgcttcccgggtgagcggataaatgccgtgaacacccaaagtgttctgggcggttaccgctgtaatggctgacatcccgaaaacgccgagctcctgaaaggttttgagatccgcctgtataccggcgccgcctcctgaatctgatccggcaatcgtcaatgctttgcatatgctcatgatgtttttctctcctttcgcattatccgatccatttatgataaaaggatttcgctctgctgatatcacttgtgccgtgtattaatgctctgccgtcacgaaacagtaccatcttgaaattgtctgtgcaaaacgaaattaaatacgggttggctgaaacatcaagccctgtccgtctgagctgtcccgcaagtttttgcagatcaacctgttcggagatccccgttctgatctgcaccgtgttccgcccgcacagaaccgccgcttttgtctgattttcataggataaaaacggaaattcgtttgtgccgcagcttgggcaatcagccgacttaagacgggcgacgtttatttctgaccgttcatttttccataaatcaaaggaacggagaacatgctcgatagatccgcccgttaacagcttcagcgcatctgctgcctgaaaaacggccgtctgcaatacagccgggctgatgattcccgccgtatcgcatgtcataccgcctaaaggcaatgtttcaagcagacagtgaaggcacggcgtgacaccaggaatgacggtaaaagagagcccgtagctgccgacacaggcgccgtacagaaagggaattcctttctgtacagccgcatcgttcacaatcagcctcgtttcaaagttgtcggcggcatccacgatgagggaggcgccacgaatcaatccgggtgcgttttccgcagtgacatccatgacaaatccctcgacctctacatcgctatttatagatcgaagccgtttttcagccgccgcggctttcggcatttcctgtctgacatcatcttcagtataaagctgctggcgctgaagattactccactccacataatctctgtcagcgatcgttaccttcccgatccctgctctgacaagcatctccgcacttgccgtcccaagcgcacccgcgccgataatcacggcgtgagacgaccggagcttctcttggccggagggaccgatcggctgaaacagctcctgtctggaatatctgtccgtcataccggaagaccgtctcgcggactgcttgcagttccgtaatctttcaccggaattctcccggcttcataagaaaggcggcccgcttctacggcaagcttcatcgccctggccattttgaccggatcatcagcgcctgacacagcggtatttaacagcacaccgtctgccccgagctccatcgcgtaggcggcgtcttttgaagatccgacgccggcatcgacaatgaccggcaccttcgcctgttcaatgataaaggatagattcagcggatttaaaattccctgaccggaaccgatcggcgaagcgcccggcataatggcatgcactccgagctcctcaagacgtcttgcgagcacgacatcgtcagacgtatacggaagcacgataaatccctcttcgagcagctgttctgatgctttcagcgtttcaaccggatcaggcaaaagtgaccggctgcatccgatgacttctacttttatcatgtcacaaagccctgaagctttggcaagccttgcgattcggaccgcctcttcagccgttgcggcgccggccgtattcggcagaagcgtgtatttagacaaatcaagctgttcgagaaagttaggctgagactcttcaaagatgttcatccgccgcaccgcaaaggttaaaatatctgattccgagacagccaccgcctctttctgaatctcaaaactcggatattttcccgttcctaacagcaatcttgactgaaactgttttccgcctattgttaacatcctcatccgcctcctacaaaatggacaatttctatgacatcgcggtcacacaaacttgtattttcataattctttttttcaataatttctttatttctctccacaactacgattctttgatcgagctggtacgattcaagcaaatcctgaaccgtcccctcatttcgattccaatcaatttgttttccgttcagctgaaggatcatatatgaacagcctccttgcgatcaattcgaaacgcttcttcccattcctgtttgacttgttgccccaagattatatcccgcaccatttcagccgttgccggcgccaacaggatgccgttccgaaaatggccggcggcgaagatgatgccgctgtcttcaggatgccgcccgataaacggctttccgtctcttgttcccggcctgagacccgcccaaaaccggtctattttcatatgttcgatggcgggaagcatggttttcgcttttgcaatgacggcctcaattcctccgatgtcaggcgtatcgctccagtcaccctgtttcatcgtggcgccgatgacaagccggccgctttttctcgggacaacataacaatgatcatggtaaagggttttggtcagcgtggtatcgtcattccacacggaaaggcattctcctttcacaggaaaaaaaggctgtcccaagccgagctggctgaaaaaccggccgctccataccccgcttgcaactgcgactttgtcagcataaacatccccgccggacgttgtgatgcaatattctccgttcacccgttttacggaggtgacttgtgtatgctcatatatatcagcgccatagcgccgcgccccttttgcatacgctttgcagacatagtacggttcgacatggatatcgtcttttataaaacttgcgccgagaatgtcttttgaagcgtaaggctctttttcaagggcatctttcgctgaaagccaggtgacggaaggcagatcatccatcttccgtagacgggcgatatcttcttcggtatacgccagtttaagcattccgccgttatggcgcctgatgtcaatgccgcaagcttcctcaagctcttgccccgccgcttcatacagcctttgactgtgcatggcaaaatcaaaaaacgcatcccggttttcacattccgcatgagcgcccagcattcccgcggcagcgcttgtcgtttttcggccgacttctccggcttcaagcaagacaacgttctgctgcgtcttcgccagctcataagaaatggcgcacccgataattccgccgccgatcaccgccgtatcatagtgcttcttcataatcggcctcccttaccgcgcgtgcataccgttttgccgcctcctcaggattttcagctgagaaaatacctgacatgacggcaattccgtccggtttcgcctgctttgtgtgtccgatcgtctgcagtgtcattccgccgattgcgatgacggggatggaaagcgtgcgtttgatctctgaaagcaggctgatgcctcttgcttcaagtccttgtttacattcggtttcaaatacatggccgaacaccacataatccgcatcttccttttcagcttggatggcttctttcagcgaatgaaccgaacgtccgatatgaagatggggaaatctgcttcgcacctgctttacggaaaagctgcgggacggaagctgaacacggtgtatattggcaaaaagcgcgatatccgccctgtcattgatgatcaatttgtccttatccgcaccgccctttttcaaaagggacaaaagctgcatgatttctcccgctgttttatcccgctcacggatatgtataaagcttacttcgcgctgaatcgaaagaatatcctcggccagctcggcaacgggtttgcgattatcagttaccgcgtgcagctccaaaagattccacctcttttccgcccttctcggaccagctttctttttgataggccattccccaaaattgatattcataatagcttgaaatcacaaaattctctttcattttcgcgcggatgtcctctgtgctgttttcagcaatctcgtcaaaacggctgatctgttcttcgacttgctgtctgaaccagtctccgccgtatgtaccgatccatttttcataaatcggatgctccggtttgcactcttttaagtgttcgccgacttcataataaagccaataacagggcagaagcgcagctaatatttctccaaaattgccgctcatcaccgatctgtacatatgagacgtataagaataggcggtcggtgccggtttaaatgccgcacgctcttcttccgtaatccctaaaagctccgtaaactcgcggtgcagcgccatttccgcttcatatgtcccttgagcgtggcccgccatcctgcccgtcgtaaacaagtcttcggcatatgcggcgccgaacgcctgaacttttgcaaaatgcgtcaaatagtaggaatcttgcagcacgtaatagctgaaacggtctatcggcaggcttccgtcaccgattcccgttacaaacggatgaacaaaacttccgtcccaccattcggcagccgccagtctgcattcttcagaaaatgtcatcatgtcttcccccctgttaaaataaaaaaaccactttcccgcatcggaaaagtggtttggaatttaaatggataaaaggaaccccaaaaaaataccgctccacttccctacgcaggtctgaacctgttcaagttatgagggtctaaaagtctcacttttatctcagcccttatgaaggacacccctagtggtcatacgattaatgatttatttgttatgccttctatattatcacgaattgcaatttggtcaagcttcaagaatttttctcagttccgacacgtagttgcgcgagcccgtgacgatgagacggtctcctgttttcagccgcgtgtctccgtgcggaacgatgctgtccacacctctgaatatccggacgaaaatcacatcgcccatcagcggaaattcccgcagaatgatgccgttatacgccgggttttccagattgatctgatataacgaagactcctcattcgtcaggaggctcatcacgcccggcgcctcaattaatgcgcgcaagagcgtctttgtagacagaaggatagaaaaaatactgatgccctcttctttcagttttgtttcatgctcaaccgagccgacgcttgcgatgatacgctcagtccctttctctttcgctattaaggcgatttcggcgttcacatcttcatttcccgtcgccacgacaagaatatccgttttgaaaataccgtgcgactcaagcgtgccgggctcgtaatcagaaatcgtgtcaaccgaaaaaacggattccgcaagcgtttccccggcattttcctgatacacatggacgacccgtacttcatattcctcttcaggcaattccagcgtaaccggaagcgtcatttggttggccccgataaatgtaatgcgctttttttcctgcggcgcactttgccgtttgtataatttcttaaagccgatcggcgtgatgatgctggcaataaccgcaactaaagtcagcgcgccggacatattggcgctgataatgtggagcctttctccgatcgtagccgccgcgataacaagcgacagcgtggacgtcagcaaaaagcccgaagcaaacacggttcttttgtcataccatttctttaaataaaacaccgggaacattttgctgataaacagcgcaagcagaagcagcggaatcatcgttaatgttttcggatcttggaaaagcgtccaaatgtccaatttcaccccgaccatgacgaaaaagatcggaattaaaaacccgtagccgaatgaatccagctgttccaccatttctttattcggagacagaagcgataccagaacgcctgccaaaaacgcgccgagaatattttccgccccgagagattccgataaagcgacaagcacgataatcagtgtgaaaatggctctcgtcccgatctgcacggtgcctttggacatcgactgcacaaatgaacggtgtttaaagatcctgccgaagaaatacagcacgacccccgcggcaaagagaatcaacagaagccacatatttccgctgtcttctccgtaaagagaagagaagaaagcgagcagaatcatcgtagccaagtccgcgataacggcgacaagcaggatgatctggccgatattggagttcatgatccgttcttcctttaaagtcgggaccaccacaccgagtgatatcgtcgaaataataagcgtcattaaaaatgcgttttgtataaaaccagctaatacaaaggcataggacagcagcaatgataaaataaagatgccgaaaaagataatcagtgcggcagaaaacgtgttgggcgcttccttgccattcggaaggaattgttttttcttccctttctcaaatgaagaaaaatcaatttccaagccgcttaaaaacattaaaaagataaagccgagaacagacagcgtctccagccacgtatctccctgaacgacaagattcaggccgctttttccgataataagccccatgatgatctccgcgacgacgacggggatgctgagcttaaaccgatgtaaaaggagcggcgtcaaaaaagcgacgatcagaacgacgactaaagatgcgactgatgtgtgttccattcgtaaatacctccttaaaacaagggttataaaagcccgcttaaagcgggcgaaaccttacttttttttaaaaacataacgcatattctaacaaggctgaacgcgaaaaaaaagtgataaggctttatttctttaattctttttttaatttgtgcaaaaacaccgtaattaggtataggaattagccccataataaataaaaataaaaaaccgttaataaggaggctgacacgaatggcttatgacatcatcagcgatatacacggatgttatgacgaaatgatcgcgttaatgcaaaagctcggatatgaagtcaaagacggaacgcccgttcattctgaaggcaggacgcttgtctttgcgggggatttaacggacagaggcccaaaatccgtagaagtgatgcgttttgtggcaaaagcatatgaaaaaggagccgtccgttatgtcccgggaaatcattgcaacaaactgtatcgttacttaaaaggaaaccccgtaaaagtgatgcacggactggaaacgacggcagccgaactgaaagagctgtctcccgccgacagaacggaagtctccagacaatttatccgattatatgagtcagcaccgctttatgacattttacataatggcgatctcattgtcgcccacgccggcataaaagctgacgatatcggtaaatactcgcgtaaggtaaaagaatttgttctgtacggcgatatcacgggtgaaacgtatcccgacggcaggcccgtcagaagagactgggccgccgcttatgaaggcaaggcatggattgtttacggccataccccggtaaaacgcccccggatcgtcaaccgtacaatcaacattgatacaggatgcgtcttcggcaatcaactgacaggctttcgctttccggagcatgaaaccgtctctgtggaaagctcaatgccctatgatgcttcacgatttcgcgaggatcacggcagggaggcatgaaaaaaagcccgaaaccggtaa

SEQ ID NO: 24 - DNA, 62429 bp, Bacillus amyloliquefaciens
gaattaagtggcgcggcagggcgttgattcccgctgtcgtcaccggcatcataatcatggctgttcccaaaagccgcgcggtataaacgacgacaatccaaatgagagacgtcgagtctgtcagattcataaacggaagggacgtgagcaggatgatgaagaatccggtcatcgcaaggccttttccgccgattctgtcaaacacccggccgataaacggagacatcattcccatcacaatcgcgcccggcaaaagcattaatccggtatcaaacgcggatacgccccggactttttgcgtgtaaagcgggagaatggtttctgttccgatcagcagcgcgaagacaagcgttccgagcagggtggtcaggctgaaaatcccgaaagaaaacacgcggaattccagcatcggttttttgagcttcatctgtcttgcgataaagaaaatcagcgcggccgctccgacaagcagcgaagtcagcacttcagcactggtccaccctgatgaaccggcgcttgagaagccgtaaagcaggccgccgaatccgagggtcgataagatcacggataaaatatcaatctgtgtttctcgtaatgtcgtgacgtttttcatcagaataatcgctaaaagcaaatcgatgaccgcgatcgggaagataatataaaacaaagaccgccaagagaatgcttcgaccgcccatccggaaagcgtcgggccgatcgccggcgcgaacgaaataaccaagccgaccatacccatggcgcggccgcgcttttccatcgggaaaatcgtgagaaataccgtctgcatgagaggcagcataatcccggcgccggccgcctgaataatccgggccgttaagagcaccggaaaattcggggcgaatgcgccgacaatggtgcccgccgtgaaaatactcatggcggaaatcaagagggtgcggctcgtaaatttctctattaaaaatgcggtaatcggaatcaaaatcccgttcgtcagcataaacgatgttgtcagccattgtgctttgttggcgtctatattgaagtcattcataatgtgcggcagcgccgtgataagcagtgtctggttcaaaatggcgacgaacgctcccgccaaaagaatcccgacaatgacagagcgtttgtatggtgcagtttcaatactcttattcaagctgattccttctttctttatagtttgagcaatgttttaacggctgcaagcggctggtgcagcggtccggcctgctccaaataaccgatgagcgcttttataagaaaatcccgcggctgtttgtccgctgattctttctccagcatagccgccgcggaagcgagtcctgcgacgtcatatttttcctccggaaggactgagaccgcttctttcagttccttcaggctttcagccagcaatacggttttgtctttcggctcaaatgaggaagcggaggcgatataaaggtcaatcatctcctgaggcaatgcggtttcggttgtcctgttttcgacgatgagattgagatggcggatgataaactccgtgagcggctccagggcgagcggttctttttccagcttaatcagcgtgatgcattctctcaggagcccctgcaggacgatcaccagctcccatacataaggaataatgtcttcgccgtacgtctgaatcagtgaatcgcgatgccagcagataaaggtggagcgggctctgtggatatgccgctttacccgctcattaatggaagaggggcttccgtacatcagcatattaaaaaactgctgattgcgcctgaagccttcaagctcagccatcagttttttggcaaaccgttcctcaggggagaggcttgtttcttcattcaataatgaagcggcggctaccatctgtttctggttaaaatcgagcagctccaggagcaggtcttcctttgattcaaacagcttatataaagatgctttggagactttgcactcctctgcgatcgcctgcatcgaaaccgacgaaaagcttttcccggaaaaaagcttccttgccgccagcagaatatccgttttcttatcattcataagcccagattccttctttcgtcacaatagaaaacccatcggttcacagaaaaccaatgagtatatgatgaaaatattaacaaaaatttttacatagtgtcaacgcttttgtttgagaaatagaaaaaacctgccggagtgttccggcaggctgatacgtttatttatccgtcttaaatccttgtttttcaagcatttcacgaatgtgaggataataaacctgcttatagtaggaagtgataccttgtgaccagtttcttgtttcctgtccgtcggtgcgttttttcatgtattcggacatctgcttgtcataggcctcgatatgggttcttaaatcttcttcttgatacgtttcatgatgcagaacggctgcttgcggcagacgcggttttttcgcggagcggtctgccggatggccgatgacgagaccggaaaccgggaaaacgtatttcggaagtttcagcaattcaatgagttcgtccggcttgccgcgcacggcgccgatcggcacagtgccgagtcccattgattcagccgcagccgttgccgtacccagcgcaatcccgacatctacggctccgactagaacggactctaaaccgttcgtgatctcaagcggtgtatcattatattcttcaagcgcaattttggcgcggttaaaatcagcgcagaataaaaggaaaaccggcgcttggtcaatccacggctggccgcccgccaattcggatatttttttcttccgttccttatctttcaccgcgataacggtaaattgctgaccgttaatggaagtcggcgctgcctgagcggcttggatgataagatccagctgttcatccgatacggtttcatctgtgtagctgcggatggaacggtggtctgttaataattgaaggacttcgttcatgtcattcatcctttcgttactctgacagttctgtgcggacgacgtcaagcggcgcactcagcacttctttcgcttttgccacgaatccttggaaatggtcagttgcgttatggaatttcatcgcttcttcatctttccattgttcaagcatgacgaatgtattctcctcaccgactttttcgaaaagatcgtattgcacatttccttcttccgcgcgtgaatgctgaagaagtgattgcgcttctcctaaaaattcctcgcgtttatccgcttttactttcatgtaagcctgtaagacgatcattgttattcctcctgattgggttaatttgttatagttcgaatattatcgaactaactgtaacatgtttcattgcgaaaggtaaaggaaaaaccctcaccgcctaaattgtcacccgccgcttttatgtgttacatttgactcatgaacattccaaaccatcctgaaaccgaacgcttacagctgacaaaggttcttcatgctctgagtgatccgctccgcttagagctggtcaaacaattggcggaaacaacagaaaaaacgtgcggaacctgcgctgatgtccgggtcgctaaatcaacgctgtcccatcacttcaaagtgctgcgggaagcggggatcgcccaagtgcgcatagacgggaagcaccgttattattccctgcgcaaagatgatttacaagcggtgtttcccggcctgctggaggcgattttgcagacagaaccggaccgctggtaaataagtccccgaattccgggggtttttttatgcgccgaaaactgcccggtaaagcctgaggacgccttcttgaatatcgctctccttcagacgggcgaaccccaggataagctgcggtttgtttgaatcgcctcccgctttcagacggaaccggctcatcgcaaacagatcgagctgttctgcatccgcccgtgccaatatctctttttctgaacgggcgcagtcaaactccgtgacaaaatgaagccccgcattggcgccctttacacttattctttctccgaatgtttcttccaaagccgaaatgaggcgttcccgcatgttcttataatgctgcttcatctttttaatatgtttctgatattcacctgaatcgataaattctttcagcgcgagctgggcaagcgtactgcacgtatgcaggtcatacgttctctctttgaacgtccgcaaaagcccgggcggcagaaccatatagctgatgcgcagacctgggaaaagggattttgaaaaggtccccatgtagatgacattttgaaaccgatcaaggctttgaagcgccggtatcgtatcggcgtcatatttaaattcactgtcataatcatcttcaatgatgaagcggccgttctgttcggcggcccagtttaaaagctgaatccgccgggaagccggcatgatcacgcctgaggggaattgatgggaaggcgtggtgatcaatacagagggccggcgcttttcgatttcggccatggacatgcctttctcatcaaggccgatcgttgctgtctttttcccgaggttttgcagcagccggtacatcctcatatatcccgggttctccatggcgtagagcgcgtcttttggcagcagttccgtcagcagctgcaccagcatttgcgtgcccgccccgagcacgatttgttccgggcggcatgtaacgccccttgtcagggaaataagccgcgaaattgtttcacggacttcatataaaccttgcggatggacgagttcaccgagtgtatgaaatgaacgggcggctgctttatgctcacagcggaaccagcttttcagggggaaatgcgccgtatccacgctcatatgagaaaacgaaatccagccgcttttatccgtctcccgctctttcaaatcatccggcaataggagcgaaggcgcttcttcatgataaaccgtatcaatttcctccacgaaaaaaccttttctttcgaccgcatataaataaccttccgaaagcagctgctgataagctgaattcactgaattcacgctgaccttcagcgtctcggcaagctcccgtttagacggcacctttgtatgaggcatcaggctgcgcttcaaaacggccgcttttatgtgctgatagatctgctgatagatataatccgccgtttccgaatgatcaatggaaatcgtcagcatccagaccctgcccctttctgataccatggataaattgattttggtacttttcatcataccaaaaagaagtcagaatgataagaaaacaatgcagggggatggaatctatgagccaaacagcatcatcagaagtgacaactgcccagtggcagcaaaaacgggatcaattcgtttccaagggggtcggcaacggaaaccgcggcatggcggtaaaaggggaaggggcgcttttgtacgatttggacggcagacgattcattgattttgccggagcgatcggaacgctgaatgtcggccattcccatccgaaagtggtggaggccgtgaagaaacaggcggaggatctgattcacccgggttttaacgttatgatgtatccgtcttatattgagctggccgaaaaactttgcgcccttgcgccgggagatcatgcgaaaaaagcgatttttctcaattcgggggcggaagcggtggaaaacgccgtgaaaatcgcgagaaaatatacgaagcgccaggctgtcgtgtcatttacaagagggttccacggccgcacgaacatgacgatgagcatgacgagcaaggtgaagccttataaatacggtttcggcccatttgcctcagaggtgtatcaggcgccgtttccttactattatcaaaagccggccggcatgagcgacgagcagtatgacgactttatcatcagcgcttttgaggatttctttatcgccgcagttgcaccggaaaccgtcgcctgtgtcgtaatggagccggttcagggagaaggcggcttcatcattccgtcaaaacgtttcgtccagcacgtcgccgctttttgtaaaaaacacggcattgtttttgtagcggatgagattcagaccggttttgccagaacgggaacgtattttgcgattgaacatttcggagccgttccggatttgatcaccgtttccaaatcacttgcggccggattgccgctgagcggcgtcatcggccgggcggaaatgcttgatgccgccgcgccgggtgaactcgggggcacatatgcgggaagcccgctcggctgtgcggctgcgcttgcggtcttggatattattgaagaagaagggctgaatcagcgttccgaggagatcggccggatcattgagcatcaagcgctcgagtggaaaaaagagcatgcctgcatcggagaagtgcgcagactcggcgcgatggcggccatcgaaattgtcaaagatccggacacgcgggaaccggacaaagcaaaagccgcggcgatcgctaaaacggcgaacgagaacgggctgctgctgctgacggccggcataaatggcaacattatcagattcctgacgccgcttgtcgtgacggatgagcagctcaaagaaggcctttccattatcgaagcagctctgtgagttcaattattggaatgccggcggatgtgtctgctatcatgaaagtatagatacatcaacaagcattcaatggctttactatagcagagaaaggaatgttcaatatgccagaacaattaacagtgtacaacccggcaacgggagaggcgatcgaaagcatcccccagcagacggccgaagatgttgaaaaagcgattgaacgttcacatcaagcgtttcaatcatggtccaaaacatcagcgggagaacgtgcctcacttttgagaaaatggtatgagctgattgttgaaaataaagaagaacttgcggaattaattacgaaagaaaacggcaaaccgtacgaagaagcggtcggagaagttttatacggcgccggctatattgaatggttcgccgaagaagcaaaacggatttacggcagaaccgtacctgcgccgacaacgggcaaacggattgtcgtcacccgtcaggcggtcggcccggtagccgcaatcacgccgtggaatttcccaaatgcgatgattacaagaaaagccgcgccggctttggcagcaggctgtacgttcatcatcaaaccggcggaggatacgccgctttccgcttacgcccttgcgcgtctcgcatatgaagcgggaattccgaaggacgtgatgcaagtggtgatcggtgacggagccgaaatcggaaacgtctttaccagcagcccgaaaatccgtaaaattaccttcaccggctcaacgcctgtcggcaaaatcctgatgaaaaacagcgccgacaccgtaaaacatatgtcaatggagcttggcggacatgcgccgctgatcgtggatgaagacgctgatcttgatctggcggtagcccaaacaatggcctctaaattcagaaacgccggccaaacttgcgtctgtgcgaaccggctgatcgtacacgaatccgtgaaagacgagtttgcgaaaaaactgagtgaagaagctgcgaaactcaaagtcggaaacggtcttgaaaaaggcgtaaacgtcggccctgtcatcaacaaaaaaggcttcgataaaatcgtcggccaaattaatgacgccgtggaaaaaggcgcaaaagtgctgacgggcggaacgtatgaccaaaacgatgaaaaaggatgctatttcgtgacgccgaccgtgctttcaaatgtagatacatccatgaacatcatgcatgaagaaacattcggcccggttgcgccgatcgttacgttctcagatattgatgaagcgatcaagcttgcgaacgatacgccgttcgggcttgcggcttatttcttcacagaaaactaccgccgcggcatttatatttctgaacagcttgaatacggcatcatcggctggaatgacggcggtccgtccgcggttcaagcgccgttcggaggaatgaaagaaagcggcatcggccgtgaaggcggtacggaaggcattgaaccgtacctggaaaccaaatacatgtctatcggactttaatgagccgaaaagaaagccccgctactaagcggggctgtttttattgagcggtctgccggtgaatatcgccggcaggcttttttgatcttgcgggaataatcggttcgattccagacaaaataacagcaaatacgattgaaagaaggtcgccatcatggatatattactggctcttctcccggctttattttgggggagcatcgtgttatttaacgttaaattaggcggcgggccttacagccagacgctgggaacgacaatcggggcgctcatcgtttcgtttgtgctgtatctgtttgtccacccggtgctgtctgggcgcatttttattgtcggcatcatctcggggctgttttggtcgctcggccaaagcaatcagcttaaaagcatacagctgatgggcgtttcaaaaacgatgccgatatcaacgggaatgcagctcgtctcgacttctttgttcggtgtgatcgtattcaaagaatggtcaaccccgatcgcgattacgctgggtattctcgcccttatttttatcatcatcgggattgtgctcacatctttagaagataaaaaggggcgggcggacggagaaccgggaaacttaaaaaaaggcattgtcatcctgctgatctccacgctcggttatttggtctatgtcgtcgtcgcccggctgttcggcgtatccggatggtcagcgcttctgccgcaggcaatcgggatggtcatcggcggactgctcctgacgtacaagcataaaccgtttaataagtacgccctcaagaacattctgccgggaatcatctgggcgctcgggaatatgtttctgttcatctcacagccgcgcgtcggagttgcgacaagtttttccctttctcaaatgggaatcgtcatcagcacgctcggcggaatcttcattctccgtgagagcaaaacgaagcgtcagctggtcgcgattgccatcgggattatcctgatcattgtggccgcggtattcttaggcgttgcgaaatcaaattcataacatatgcaggaggtttgaacatgtacacggatttaaagggaaaagtcgttgccattacgggagcttcatcaggattaggaaaagcgatggcgatccgcttcggacaggagcaggcgaaagtcgtggttaactactatagtaatgaaaaagacgcccaaaccgttaaagaagagattcaaaaagcgggaggcgaagcggtcatcgttcaaggagacgtcacaaaagaagaagatgtcaaaaacatcgtgcagaccgcggtgaaggaattcggcacattggatgtcatgatcaataacgccggcatggaaaatccggttcagtcacatgaaatgccgcttaaagactggaacaaagtcatcaataccaatctgaccggcgctttcttaggaagccgcgaagccattaaatattacgtagagaatgatattcaaggaaacgtcattaacatgtcaagcgtacatgaaatgattccatggccgctgtttgttcactacgcggcgagtaagggcggcatcaaattgatgacggaaacgctggcgcttgagtacgcgccgaagcgcatccgtgttaacaatatcggaccgggagccatcaatacgccgatcaacgcggaaaaatttgcggatcccgttcagagaaaagatgtggaaagcatgattccgatgggatatatcggtgagccggaagaaatcgcggctgtcgccgtctggcttgcttcgaaggaatcaagctacgtgaccggcattacgctgtttgctgacggaggaatgaccaaatatccgtcattccaggcaggccgcggataagaaaaaaagcgatcgcaggctctttagagccggatcgctttttgcttacgcgcgttttttctttacaagcgccgcgatggaaaggataatcgccgcagctgacagaacgatggccgcaatatcaagcgctgatacgccggatttgctttcttcgtttgactgttcagctccgtgcgcatccgtcacgctggccgatttcgtgattttcgtaatcgagtggggcgtgtcggctttctcatcacccgtccattctacaatgctgccgtctttgtaatattggtaagcgtcccaagcggcatctccgctcttttcaggatttttcgcaacgaacgtgaactgctggaattggccgggctgaatgccgccgtcctttgcttcccaagtgacggagaccgctttgtcatcatgtttggatacggatgttttccagcccggaatcggctgatattgctgaaattcaacgccggcgggcattttcagcacgactttcgttgtcggctcattcttttccacaggcactttcatcgtgtatgtttcccaagaaccggccgcggattccgcgggtttgactgagacgtgggcgcttgctgtcgccgtaaaaccgacgagtgacagggtcacggcggatatgaataataaagccttttttttcaacatgagatacactccttagtttgtcgttgagaatatttggttgatttcattaaaatcgtttgtcagcccgtggactttgatcttccagtttcccttttcggtgatggacaggttggcggcttcaaatgtgccttccttcgtcttcttcaaatcaaaggtgctttcatgctgtttgccgctgaagcccgtctggtaaacagtgaccgtaaattgctgaatgtcttttaccaagctgccgttgtgatcggtgacaatgacttgaaattcatttttacccggctggttcggcgtaatgtgcaaggacagggtttccccgtttccgatcgtttctgagccgttaaaaggcaatggcgcaggcggcggcggactgggcaggcttgtgaagacggcggttgtaaataacaccgcaatgcctagtgcccattcggcctttatcgttgcgctgatgctcctttttctgctgaacttcgtcatccatacgtgaacggcgccgagcacaagcacgatgacaaacagtccgattttcaaaaggagcgtcttaccgtaagcagtgtgaaagagtgaatcaaacgtgcggataatgaaaaatccgttcagcacgcctgaaaataacagcacaccgacagaggcgaacgcccaaggagaaaaccgtctgaccgtttcccaagcgatggttttatcgggttttctccactctgatgaaagaagcagcacaagcgcggcgataccgcccatccatacagacgcggccgataaatggagaaagtccatcgcgatgccgaccgctttttcgtcgataaccgccgcatgcccggcgaatgcttttgccaaaagcgaagcgaagaagaataacagcggcgccgtccagtacgcaaatgaccggaatgctttcttcttcaacagcgggatcatggacagggcgagcaggataaataagctgatctggatcatccagacgtacccgcctgccgttttcagaagcgtttcttttacatagtccggctgaaacgcggcgctccaagcgccgcccgcgttttctttcgtctggatcgggagctggcagataagcgcgagccccgttaaacataaagaaatcacgagcagctttacagttcgttttgcttttgatgaatctttattatttctgtaccaaaacagatggaaaaaagccgtgccgataaacagggagagagcggtgtacaaaataccgcggtcgatggccgcttcgggatgaagcgccgcttgcgatgatgtctgctcctgaagttctccgccggcttttccgatactgaaagggatgacgccggataccggatgtccgtcggccgataccgcgttccattccgctctgtaaatatcatgcggcagattatttttcaatgccgcggtcatgatgcgggcattatttttttgaatcaccgttttgcccgcgtcaacccgttcgccggatgaattatagaccttaatggagtggaatccttcttcaatctgttcattaaactcaatttcaatctgcttcggcgcttgttttaattcgctgttctcacccggatttgagtttgtgatgtaggcgtgggcgaagcttgttttcggaatcaaaacaaggaacagcaaaaagatgagccagcgtttgttctgtctcatggatgatgacaccgccttccggttggttgttgttatgtcttgctgcaggtgcatcccttctgcctgtcgtgtaagatgatgtccgccgcctcgtcaaaggtgcaaatgaccccgccgaatcctttttgaaaccgttctgcgtaatcaagcgttgagaagggaatcgcctgaggccggcagcagtgaaggtcaatatcggcatggactaaaaagtatgcggaagcggccgtcagcgtcgtctggagaagaaaatctttacaaatgacatgggacacttcttcctttttatcctcataccgcaaaatcgcgcaatgaatgcagcacatctgctcaacggcttgtgaaacggtaataagctgaacagaatacgaatgctgaatcggccgcaggcaatagccgcattgattggcgcttcgttctgaagcgggagggagcgtaatgccgccgggtgtccggataatccggtttgcatccgccagctgattgacgtctctgtacacggtcatctcggagacgccgaatctctcgcttatgtcagagattttcagcgcgccctcttctttcagccattcaagcaaggtttgctgtctgtgaatcggaagcaattctgcatcctcctttttatacgaatgagtgatgaacctccctctaagagtagatgttttcacaaatgcacacaagagcctgatgataaaatatgtgaaaaaatgttgaacaatcacaatgtaaaagacgtagtcagactctgttataatagaagagttgaatggaggaataaacatgaaagaaacgacctgcccgaactgcggcaagccgattacaggcgacatggtcagatcatccatgatcccgtgccagtttcagtgcgggcattgccatgtgaaattgcgtgaatataaagtatccgctccgattatggctgtggccattgcgatcacggtgcttttgatttatcttgtgcagatggccagaaccgccgtcatgccgatgtttccggcagcgcggtatgtgccggccgccattttcgcgctcgtatgtgcgtatccggtgtttattgtcagtgagcggctcattgccaaactcgtcgtcacaaaaggacacattatatacagaaagcgttaagacacctttgatgaggtgtctttttttgttaaggagttgtcacagtctctgtgccaaactcctctttacttttcattgaatggggattgtaagcgttttatgatgaagacacaggggagagagaaaccccgtgtcttatttattttcatctgaaggcaagcaaacagggagggaatgaacatgcagcaagaacagcaagctggcatgaaagtgaagatacagcggttcggcagttatttaagcggtatgatcatgccgaatatcggcgcatttatcgcatggggaattatcaccgcgctgtttattccagcgggatggtttccgaatccgcagctgaatacattggtaagcccgatgattacgtatctactgccgcttttaatcgcatatacgggcggaaaaatgatttacgatcaccgcgggggagtcgtcggagcgacggccgccatcggagtcattgtcggagcggacattccgatgttcttaggggcaatgattatggggcctttgggcggttatctcattaaacaattagaccgtgtgtttaaagataaagtcagacagggttttgaaatgctgatcaacaacttcacggcgggaattatcggagctgtgctgacgattatcgcattttatgcgatcggcccggtcgtcctgtctcttaacaaattgctggcggcaggtgtggaagtcattgtccacgcgaatttgctgccgattgcaagcgttttcgtagaaccggcgaaagtcctgttcctgaataacgcgatcaaccacggcattttaagtccgatcggaatcgagcaggccgccaaagcgggtaaatccattctgttcttagtggaagcgaaccccgggccgggactcggtattttactggcatatatgttctttgggaaaggctcttcaagatcgacggctccgggagcggcgatcattcatttcttcggggggattcatgaaatctatttcccttacattttaatgaaaccgatgttgatcctcgcggcgatcgccgggggagcgagcggactgcttacattctcgatctttaacgcgggtcttgtcgccgcatcatctccgggaagcatcatcgccattttggcgctgacgccgaaaggaagctatctcggcgtgctggcgggcgtcatcgttgccgcggccgtatcgtttatcgtctcggcgcttattctgaaatcgtctaaagcaggcgaagaagatttgacagccgcggcggaaaaaatgcaggaaatgaaaggcaggaaaagcgaagcggcggccgcattggcagacaaagaggaagagccggaaaacagcgccgctgatatttccgctgaccaagtcagccgcattatcttcgcatgcgacgcaggtatgggatcgagcgcaatgggcgcctctattttaagaaacaaagtgaaaaaagcagacctggatattgatgtgacaaatacgtcgatcaataatctgccgaatgacgcggatatcgtcattacgcataaggacctgactgaccgcgcgaaagcgaagctgccgcaggcggtgcacatttcggttgataatttcttgaacagcccgaaatacgatgaactgattgaaaagctcaaaaactaatcaaacagaaagagggatcttcatcatggaagtattggctaaagcgaacatcaaactgaaccagacggtgaactcaaaagaggatgccatccgcctcgcgggacagacattgattgataacggctacgtgaagaacggctatgtggaaaaaatgttcgaacgtgaagaaacatcatccacgtttatggggaatttcatcgcgatcccgcacggcacggaagatgcgaaggatgaggtgcttcattcaggcatttccgtcatccagattccggatggtgtggaatacggtgaaggcaatacggcaaaggtcgttttcggtatcgccggaaaaaacaatgaacacttagacatcctgtcaaacatcgccatcatctgctcagaggaagaaaacatcgaacggctgatcagtgcaaagacggaagaagaactggccgctattttcagcgaggtgaactgacatgattgcccttcatttcggagcgggaaacatcggacggggctttatcggcgccctgctccatcattccggctatgacgtagttttcgctgatgtgaatgaaacgatggtcagccttctcaatgaaaggaaggaatataccgtggagcttgccgacggcggccggcagacagaaatcatcggccctgtttcagccatcaacagcgcggtgcaagaacaagagctgtacgggctgatcaatgaagcggcgatcattacgacggcggtgggcccgaacgttctcagactcatcgccccgtccatcgcggaagggctgaagcgcagaacgtcttctgagcctctcaatatcattgcctgtgaaaatatgatcggcggtagcagttttctgaaaaaagaagttttcggacatttgacggatgcggagcgggaactcgtgaaccggacggtcggcttcccggattctgcggtagatcggatcgtgccgattcagcaccatgaagatccgctgaaagtatccgtagaaccgttttttgaatgggtcatagacagaaccggctttgccggcggccagccggtacttaaaggcgcgttgtttacggatgatcttacgcctttcatcgagagaaagctgtttaccgtcaataccggtcatgccgttacggcgtacgtcggctatcagcgcggattaaaaaccgtcaaagaggccatcggccatccggaaatccggcgtgtcgtgtacgatgcactttcagaaacgggcgagtacttggtgaaagcgtacggctttaagcaatccgaacacgagcagtacatgaagaaaatcatcggccgctttgaaaatgaatacatcacggatgatgtgacaagagtcgccagatcaccgctcagaaaactcggagcgaatgacagattagtagggccggctaaaaaaataaaagaaccgaacgcgctggcagaaggcatcgccgccgccctgcgctttgactatcaggatgatccggaagcggttgagctgcaaaagcttatcgcggaaaaaggcacgagccgcgttcttcaagacatttgcggtattcagccgcatgaaccgctgcacggcatcgtgctcaaaaagctcaatcaataaaaatgaacccgcgtcgggggacgcgggttttttcttgcgttataatgagagggaagggaggctgcgtgatgaatcagaagctattgccacatcgttatccgtttcttttaattgacggcacgacgaacagtgaagccggaaaatgggcggctgcttacaaaaatatcagtgaaaatgactggtttataactgaatcccaaagagagatgccattttcgctcgtcgttgaagcaatggcccaaacggcggcttgcgcgggaattaccggcggtgacagcctcggtctcttatccgcggtgaagaaagcggaaaggttaggtgccgctttgccgggagaccgtctggatcttttgtttgaggtcacgcgaatcagacgcggttttgtgttcggccgggcgaaagcgtccgttgccgggaagcctgtggcggaagctgaactcagcatatttatccagccatcgtaaaaaaagccgcctccagcggcggctttcggacaagcgtgttattttgtatcatagtctctttcactttgtgaattgtccctttggtcatgtttgtgtttttcgtcattggcgttttccttcagctcttccagcggaatcggatcggttaaatcatgatgttcaggattttcattcggtttgttcttttgttttctttctttcatcctccatcacctcaatatttcttttcctcaacgttctccccgccaaacgcaggaagcggttttttgttcctgtgggtcatatgtattaaaatagagacgactacattataaaaagtgaggtacatatatgccgatacaaagagaagacgcagatattaaactgatcgcgattgatatggacggaaccctgctcaatgacgagcagctcatcccggaggaaaaccggcgggcgatcaaggaagcggaggcgaaaggaattcacgtcgtcatcagcacaggacgcacgctgatgacctgccgcgaactggctgagtctctcgagctgtcatcctttttaatcacggcaaacggcagcgagatctgggattccaactttgagctggttgagcgcaagcttcttcataccgatcatattcaaaaattatgggatctgaggaataagcacaacacgaatttctgggcctctaccgtcgatagagtgtggagaggggaattcccggaaacgattacagatcatcagtggctcaagttcggattcgaaatcgaggatgacgaagtgcggaatgaggtgctgcaagagctcaaggaatacaaggagctcgagatcacaaactccagtccgatcaacatcgaagtcaatgccctcggtatcaacaaagcggctgcgctggcgaaggtatcggaaaaactcggcttcacgatggaaaatgtgatggccatgggtgacagtctgaatgacattgccatgattgaaaaagcgggtgtcggcgtcgccatggggaatgcgcaggacattgtgaaagaaacagctgactgggtgactgatgtcaacacggaaaacggggtcgccaaagcgatccgccactgggtgttataatagaaaaaagagagagtctcagtatgaggctctctttttttagttttgtcagatttatgactaggtccatggtaggttttctgacaaaaggatgttcaaacctgtcagaattaaatataatgaagagaaattcaacaattcggaatagtcattccgaatagcggaatgataataatataaaacgtttacaatacaggagggatcttatgtttcagattgacatcaattgtgatttaggagagagtttcggtgcttataaaatcggactggatgaagagattttggattatgtgacatctgcaaacatcgcctgcggctttcatgcgggtgatcccagcgtgatgcgcaaaacggttgcgcttgcggcggaaaaaggcgtgaaaatcggcgctcatcccgggctgttcgatctgcagggattcgggcggcggcagatcgcgattacacccgaggaagcgtatgatctgacgctgtaccaaatcggcgcgctgtcaggttttttaaaagcagaaggtgtcgagatgcagcatgtgaagccgcacggcgctttatataatatggccgccgtcaatcccggcctgtcagcagccatcgctcaggcggtctgtcattttgatcccgggcttattcttttcgggctttccggaagcgagctgattaaagcgggagatcgaatcggactgaggacggcaagcgaagtgtttgcggaccgcacctatcaggaagacggcacgctgacgccgcgttcagagccggatgcgctgattcaggatgacaaaaaagcggtcggtcaagtgattcaaatggtgaaagacagcacggtgacatcacgtaagggacaagctgtaagcctgaaagcggacacggtctgcattcacggagacggagcccacgccctcacattcgcaaaaacaatcaaaaaagaattaaaaacggcagacattcaaatcagcgcgcttgcaaaagactgagcagcagagggaggaagacagcatggagcaaaagaaaaaaacagccggaaaggcttccggcaaatggtcgattcttttaggcgcgacatttttgatggcgacatcatcaatcgggcccggctttctgacgcaaacggccacgtttaccaatacattggcggcaagcttcggctttatcattttaatttctattattttggacattttcgcgcaaaccaatgtatggcggattatcgcggtttccggaaagcgcggccaagagattgccaatatggtgcttccgggcgccggttatgccattgcttttctggtcatgctcggcggacttgcgtttaatatcggaaacatcggcggcgcgggtctcggtcttcaagtattattcgggatcaaaccggagatcggcgctttaatcagcgcagcggtcgcggtgctgatttttgtcataaaggaagccggaaaagtcatggaccgttttatgcagatcgccggcatcgtcatgatcgtattgacggtgtatgttgccgtaacgacggctccgccggtcggacacgccgttgtgaaaacttttatgcctgatcatatcagtgtgctggcgatcgtgacgcttgtcggcggcacagtcggcgggtacattacatttgccggaggccaccgtttgcttgattcaggcatccaagggaaagaagtcatccctcaggttacgaaaagctccatcacaggcgttctgattacatcgattatgcggattgccctgtttctcgccgtgctcggcgtcgtctcaaagggcctgagcattgatcctgataatccggcggcttctgtattccggcttgcggcgggaaatgtaggctataaaattttcggcgtcatcatgtggtctgccgctatcacgtctgtcatcggcgccgcctatacatcggtatcatttttcaaatcattttcaacaaaaatcgaaaagcactcacatggcgtaattatcggttttatcatcgtatccactcttatttttgtcacgatcggccagcctgccaaaattctggtcgcggtcggttcgcttaacggcttaattctgccgcttgcattagcgatgattctgttgggcgcttataagaaaaaaatcgtcggcgattacaagcatccgatctggctcacgattgcaggggcgatcgtagtagttgtcatggcggttatgggcatctatacattattcacgcaaatgccgcagctatggagctgatgatatgaaaaaccatatgagtgacatgagccccgaagaagccagacagctgatcaggaaagggcagatgaccgggccgacggtggggatggccgcttcttacgcacaagccaatctcgtcgttttgcaaaaggatcttgcctttgattttctcttattctgccagcgcaatcaaaagccttgtccggtgcttgacgtgacggatgcgggttcacccgttccggcaatagctgcgcaaggagctgatatccggacggactttccgaaatacaggatttatcggcatggcgtgcttactgaagaggtaacggatattacgccgtattggaaggatgatgatgtcgggtttttgatcggctgcagtttttcattcgagcaagcccttattaatcagcacattccaatcaggcatattgatgaaggcgtgaacgttcccatgtataaaacaaatattgactgtgttcccgccggcccattttcaggaaagatggtcgtcagcatgagaccgattccggaaaggcttgcagtccgggcggcgcaggtcacgtcacgttttcccgccgtgcacggcgcccccgtccgcatcggaaatccgcaaagcatcggtatcagcgatttgcaacagccggatttcggagatgccgtaacggtgcgggaaggtgaagttcccgtattctgggcctgcggcgttacaccccaggcggtgatcatggaagcaaagcctgatattgtgataacacattcaccggggcacatgctgatcaccgatatacgaaatgaatcgcttgctgtcctgtaagtgagaaagaatacaacgaggtgatgacaatgatgcagtatagcggaaatacagcgcttgatatacagccgtacggtgattccgccgttatcatccgctttggcgggcacatcagcgaagaggtcaacagccgggtgcatgcggcggcagcctgtatggaagaacggccgtttccgggcttcgttgaatgtattccggcattcacaagcttaacgatcttttatgatatgtatgccgtctcaaacataaaaaaaggcgtctctccttttgccttggtcaagaaagaagtgacagaacgtctcagccatataatgaccgaccgccagaaagagcgccgggtgatggaaatccccgtttgttacggcggtgatttcggtcccgatttagaagaggtcgctgagatgaacgatctgaccccggaagacgtcatccgtattcatactgaaggcgaatatctcgtttatatgctcggatttgcgccgggatttccgtttttaggaggaatgtctgagcggatcagagcgccgagaaaggcgtcaccaaggccgtccatcccggccggttcagtaggaatcgcgggaatgcagaccggtgtgtatccgatatccactcccggcggctggcagctgatcggcagcaccccgctccggcttttcaggccggaagaacatccgccgagtcttttgagagcgggcgatacggtgaaattcgtccggatcacggcagaggaatacagccgcatcaaggagggagccgaatgagtatgaaagtggtaaagcccggtctcttgacgacggttcaggacacgggacgcacggggtatcagaaatacggtgtgctgggaagcggcgcaatggatacgatctctctgcgcatcgccaatcttcttgccggaaatcaagaaaaagaggcgggactggaaattacgctcatggggcccgggccttcctttgaattttcagaacctgcggttattgccgtgacgggagctgattttgcccttcatattaatggggagcccgctcctctgtggaaaccggttttgataaaggaaaacagcgtcgtctcattcgggccgtgcaagatggggagccgcgcatatctcgccgtcgcggggggatttgacgtgcccgccgtcatggaaagcaagagcacgtatgtcagagcggggatcggcggtttttgcggaagagcgctgcaaaaagatgatgagctgccgctcggccgtatgacgccatgttcggaatcaatcgcgtaccgtctgagcgattctttcggacagcatggtttctcagcgcctgattggtctgtcagcagcagagggtttctgccgctgaaaaaaaatccggttatacgagtgcttgaaggcgctcaatttcacgcttttacagaagaagcaaaattgcgtttttatcaagagtcatatacggtcacgcctcaatccgaccgaatgggctaccggctgaagggcgctccgcttgaattgcgggagccgctggagatggtatctgaggccgtgacgttcggaacggtgcaggtgccgccggacggcaatccgattattctgctggctgacagacagacgacggggggctatccgcggatggcgcatatcatatccgccgatcttcctctcgtcgcccaaacgatgccgggggaacatatcacgttccgggccgtttcgctggaggaagcggaaatgctgcttttggagaaggaacagcagctgaaggagctgaaagcaaggctcaaaatggaatggctgatctgacaaaggggctaaagaccatggaaaacttaaacaaaaccgtcatcaaatcaatggaactgcttcatttgtttctgactgaaccgagcctgagcttaaatgaactggtttctctatcggagatgccgaagacctcggttcaccggatggcaagctcgctggaagaaacggggtttctcatccgggcggcagacggccgttatcagcttggtctgatctttttacaattcggccagctcgtctctgaacgtctggatatcaggaaaatagccaaaccgattatggaagagctgtgcggcgaagtggatgaggccgttcagctgatcatgagggacggggatgaagccatttacgtcgagaaaattgaaggcacccaaaccgtccgcctgtatacggcaatcggccgccggtctccgctgtacgcgggagcgtgcgccagaagcattctatcgtttctgccaaaagaggagattgacacatacattcagaagacaaagcttgccgcaatcgcctcaggcacgatgacggatcgggctgaactgcttcaatctattgaaagatccttacaatcaggttatacgatcagctattcggaattagaggattacacggcggcgatcggagcgccgattttcaatcacgaaggtaaggtggctgccggaatcagcatcgccggcttcgaagcccggttttcagaggacaggctgccgtatttaaccgaaaaggtcaaaaacgccgcacagcatatttctgagaaattgggttattgaccgagccaatttttcttcactcgcgtacattacaatatcgatagtaacgagtggaggaaagtaaatgggacttgtttatacggcgctgggggattctttgacgacgggaaggggatccgggccgttttccgccggttttgtccagcggttcgggcgcatgatggcagaagatttacagacaagaaccgacgtatccatctttgccaaatcaggccttgagacggtagaaattctcgggcttatgtccttgccgtacattcagaggcggattcaggctgctgatatgattacgattacaggctgcggcaacgatttgatcgattcggttcaggcatatcagcaaacatcggacgcttcggtgttcaccagcgtgtccagtcactgccatgagaactttgaaaagatgatagccaagatcgctgccttaaaagggccgcacccgtctccttatgagatccgcgtctttaatttatacaatcctttcccgggcatctccattgcagaaaaatggatatcctcttataatgcgcacctcagcacactcgcatcggcgccgcacgtcaaaatcgccgacgtccacagcgctttcaaaggaaaaatgaatgaatatctctctcatgaccgcgtacaccccaacagtaagggatatgaagtcatggcatgcgtcctgcgggggctcggatacggaagcctcgcccgctcataaaagcgcgctccttttcatcgggagcgcgcttttcgtgctccttaaaacaaacttaaaattgcccgactttcgttctatccgcgcaaaaaatacgctagaataatgggggataaagacagaaatagaattgtgttcaaaaaatgataacagaaaggatggattgctttgctgcgcgccttaaaactgtcactcgcgatgctgattattatacttgcggccgccgcatttacgtatgcggaacatacctcagtcatacagccggttatgctcgtgtttctcggtgcggtcatgttcattcaggggctggaggaaaaacggaaagaaaacgacggctccgggaaattcaatatctataccgccgtttttgtatggtcaatctccttaatcggttttacgcttcacgcgatctgagtctgatagatcctgaaaatgctccacaacgggaaatggtgaataaaaacggtgcagtaaggctttccattcctgatattccggcgatccgcgaaagccttttgtatgatcttctaatgtctcccattccacaagcagcaaatatttatgcgtcttttccatacatttggacaaggaatgggacagataacctttcatgcccgcgataatcggctccgcccggcggaatgcctcttcgaattccccctcaagaccttcttttacataaagcatggctgcttctctgatcatctgaaattccccctttttttaatagatacattgtataagaatatggcccgtgacggcaggaaaaacaaaaaaatttaaaacaatatgagaaaaaaatccttgccagcctgatttggtttaggagaaaataacagttggaaggcaggggaatagacagtgaaaaaagggttatacctattacttttactcgcaggaatcataggtttgatcggctgctcgaaaacggaatcggccgaagacagaatgaaagatttcgtaaaagactggaacagcggtcattacgataagatgtaccaaagtctcacccaggatgaaaagaaaaagctatccaaaaaggattttgtaaaacgatatgaaaccatttatgaacaagcaggggtcaaaaatctgaaagtcactgccgaaaaacaggacgaagacgacaagaaaaaagatgacctccagcacatcgattataaagtcagcatggatacaaaagcagggaaggtcgcttttgaaaacacggccgtcctgaaaaaagaaaaaacagacgatggagaatcatggaacatcgactggaatccttcttttattttcaaacagctttccgatgacaaaaccgtgcagatcgcaaatgaagaaccgaagcgcggacaaatttacgacaaagacggaaaaggtctcgccgtgaataccgaggtgccggaaatcggcattatccctggaaaactcggtaaggataaagacagcgtgatcaaaaaactgtctgaaaaactggacctttctgaagacgatatcaaaagcaaactgaaacagggctgggtaaaagacgactcctatgtcccgattcaaaaaatcagaccggatgatgaaagcaaggtcaaaagcctgctcgcattagacggcgtgacgaaaacgaaagtcagctcccgctactatccgtacggcgaaaaagcagcccatctgaccggctatattaaaaccatcacagcggagcagctgaaaaaagcgaaagacggccaatacagcgatacttccaaaatcggcatcgccggccttgagaatgtatatgaagacaagctgcgcggcacggccggctggaaaatatacgtcccgcaaacaggtgaggtcattgctgaaaagaaagccgaaagcgggcaggatattcatgtaacgattgacatgaaaacgcagacgaagctgtatgattctatgaaagatgacagcggagcggcagtcgccctcgaaccgcaaacgggagagacactcgcgctcgtcagcgcaccgtcttatgacccgaacggctttattttcggctggagcggaaaagaatggaaaaacctgaatgaagataaaaacaatccattttcagcgaaattcaacaaactttatgcgccgggatcaacgattaaaccgattgccgcggcagtcggcctgacaaacggcacattgaaagcgtcggaaaagaaaaaaatcaccggaaaagagtggcagaaagattcaagctggggcggttaccatgtcacacgcgtatcagagcgcctgaatgaagtggatctcgaaaacgcgctgatcacatcggacaacatctactttgcgcaaaatgccatagatgccggagcggacgcgtttacaaaaggattaaaaacatttggctttgatgaagagattccgtaccaatttccgattgaaaagtcttcaatcgctaacggcaagcttgattccgagatccttctcggagatacgggctacggccaggggcagatgatgatgtctccgctgcacttagcggctgactataccgcatttgtaacagacggaaatctcgtcaaaccgacattgatcaaagacggagaaaaaacaccgcaaatctggcataagcaagtggtgtcgaaagccaatgccgaagaaatcacgaaagggctgagaggcgtcgttgaagatccgcgcggctctgcatatcagccggccgtaagcggcattaccgtagccggaaaaaccggtacagccgagctgaaaacgtctaaagaagataaagacggcaaagaaaacggctggtttgtcggttacgattataaaaagaaagacctcttgatcgcgatgatgattcaagacgtcaaaaaacgcggcggaagccattacgtcgttgaaaaagcgaaaaagcagtttcagaatcattaaatgacgatttttgcgggctgaaaggaaaatcggccgccgaagcagaatgaaacagcatgggcaattcctgaaaacagagatacaagaggctctaagaaaaaagggggatttcacatgcagcgcattcaattggctgaagacctggaattttcaagagtgatacacgggctttggcgtctgaacgaatggaatgtttcagacggagagctgctgaatctgattgaatggtgcatcagccaaggcatcaccaccttcgaccatgccgatatatacggcggttatacgtgtgaaaagctgttcggcggcgctttgtccctttcgccttcaataagggagcgaatcgaaatcgtcacaaaatgcgggattgtcattgaatcaccggaacggcccggaaacaagtcgcatcattataatacgtcgaagtctcacattttagcgtcggcggagcagtcgcttttgaatctgaatacggattatctggacgtgctgctcattcacagaccggacccgcttatggacccggaggctgtggctgaagcgtttcacgcgctgaaaagctcgggaaaggtcagatatttcggggtgtcgaactttaaagcgcaccagtacagaatgctcgaatcctatttggatgatccgcttatcacaaaccaaattgaaatttcggcgtacgagcttgaaaatattcatgacggcacgctggatttctgtcaggaaaaacgcattccgccgatggcgtggtcaccgcttgcgggcgggagcgtctttaccggacaatcagataaggacgtccgaatccgtgccgcgcttcgttccgtacaggaagaaatcggcgccgcttccattgacgaagtcatgtacgcatggctgttcacccacccggcagacatcatgccgattgtcggcagcggaaaagagaaccgcatttccgccgcggtgcgtgcatccgcgtacaaactcagccatgatcagtggttccggatttataccggtgtccaaggctgcgatattccataaacagaacaaacgcccggaagctagcttccgggcgtttgtttatgtggtgtgcaatgtctaaaaacaagtaaggtcactttgaagtatagccgtgcggatcaagagtaacaagcgtcatggcatattatctgacacatttttctttttcaatactgtcacacggcccagtgccaaattgccatttgaaaatggttgaataatcattgaaagcgttttatattataacttacaccactttccccggcagcactccccatatgccatacttctcacaactagaaaatctggaggcgcgtttcatgtatatgacagcgagagaacaaaaattaatgaaacatcttttactgcagaaccggtacgagacagtgcatgaactggcggaagctttacaagtcagcacaagaaccgttcaccgcgagttaaaaacaatcaaaccgatgatggaatcattcggtctggcacttgataaacagcccggcaaaggactgaaagcggtaggaaacccggaggacaaacaaaaactcctgtcagacctgtcctatgaacagtatgaatacagcgctgaggagcggaaacttttaattctatgttcactattagagtctcaagagccgattaagctctacagtctggcgaacgaactgcaagtgacaaacgcgacgatcagctatgacctggatgagctggagacttggattgcgcccttcggcttgacgctgatccgaaaaaggggcttcggcattcagctgacggggccggaaaatgcgaaacggaaaatcgtcggcaatctcatcgtcaaccgccttgatattcaaagctttttggaagcggttgaattgaatattaaaggaaaaccggacgatgctgaaaaaatgttcggcgtcgtaaataaagcggaacttttgaaaatggaccggctcttaattcagctcaaggaaaaaatcgcgatcgccttatctgacagctcatacatggcgcttgcggttcatttaacctttgcgatggaccggatcaggctcggagaaaccatcacgatggaggattcggaactaaaagcgctgcagcagacgaaggagtacggctctgcgctggaaatggcaaaagagcttgaaaaagcgttcggcgtttcaattccggaagctgagatcggatatatcaccattcatttgcggagcgccaaccgcaaatacaaaacggaattcaaaccggaagacatagaggttgaaacggccttgcaaacgaagcagctgatcggcttcatttctgaaaaaattaaaattgatctgacggaaaacggttctttatacgatggtttaatcgcccatctggagcctgcgatcaaccgggtaaaagaaaatatcgacatgtacaatccgatgactgagcaaattaaacgcgactactttctgctgtacatggccgtagaagaaggaatggaaaaattctttccggggcttcttttctctgatgatgagatcgctttcatcgttcttcacttcggctccgctctggaaatcaaacgggaagaagcgaagatcaaagcgctgatcgtctgttcaagcggcatcggatcgtccaaaatgctcgcatccaggctgaaaaaagagcttccggaaatccgttcctttgatatgtcttccctcatcgaactgaaggatcgagacatcaccgcgtatgacatgatcgtatccaccgttccgatcccgtatgaaaacattgattacgtcatggtcagtccgcttttaaacgaagaagacgctgatcaggtcaagcagtacatcaaaagaaaaattccgctgattcttgacaaaaaaagaaacggtaaaagagaagagaagcagccggagacgcctgatatgctggaagcggccggccgtatggcgcattacgcggcggttatccaaagcgtgctgcggaacttttcggtcaaatccattgagtcaaacacggcgtatgagctgtttttgaaccgtatgtttgacatgctggagcaagaaggattgattcataatgcccaaaaaaccgcacagtgccttgctgagcgtgaacgacagggcggactcggcattccgggaacggcgatggccctgtaccatctcaaaaatgaagaaattgtcacgccttttttcaaaatttatgatttgacagctccatgcagtgtcaaaggcatggacggaaattccctgaccgtcgaccgcgctttggtgatgatggcgccggctgatatgcctgctgaagggtcggaaatactaagtgcggtcagttcggccatcatcgagtccgaagacagtataaaagccttccagactgaggatgaggccgatttatacaaacgtttaaacaagctgttttatcatttcattcgggagaaaggacagcggtaaacaggaagcgcacacctcatgtggggtgtgtttttttatgcatgtatgagggtaaggggaagggaagaaactaaaaacacgggactattgtatcattcaccgatggaatagttctaaaacaaaatagttttacaagttatattttttggtttaaaatgggttgcgtgagaaagaaaatctgacagagtttttttgtgatttatcattatgggagatgaaaatatggagacattacagcatctgattctgcatgacatttcaaatagcgaagagatcgaagctgtaaaaagcggtgcgcataccctgacctacgcggaatatcgaaaacgaatcaaccagcttgcacaagcgcttcttgataaaggaataaaaaaaggcgacagagtggcgatgctttgcaaaaacggccacgcggcatccattgtcatgtttgcggcactcgaaatcggcgcggtggttgtgccggtcagctggcaattaacaccttacgaaatgaagggcattttagcagcctgtgaaccgaaagctgttttttacggcactgaatttaaagagatcatggaagaagtgcttcctgcgcttgcatcttctcttaaactgaaggtcgtaacaggaacagctgcggagacaacgcctcagtttgacgctttattgacaggctccggtgaaacaccggacgtcgaaacggtgtctgaaaacgatacggcattgctgatgtttacctcaggtacaaccggcaatccgaaacgctgcatgatcactcacggcggcatatacaactacgtaaacgcgacattggcatacacggggagaatgcagcatgtccgcttcttagcatgccatccgaattaccatacgagcgcgattatctgccagatggtcggcacgatgagcggaacgacattcattatgacagacaatcaggaccctgtggaaaacctgaagctcatcgaaaaagaaaaaatacaaaccatcatggcgctgccagtctatttcacatacctgctgaaagcatgggaaacgcatcagactgacatgtcttctatcgtttatatgatgacgggaggaacaaaggtgccaagcagtctgattcagcagtatctcgacatcggcattccgctcatgcatggatatggaagcacggaagcgtggggcatcagctcttggaatccgcaaatgggaatggataaagccgcttccgcgggtaaaccgatggaagaagtggacgtccgcgttgtagatccggaaacaggtgaattccttccgcaaggttcaatcggagaagtcgctgtgaaaagtccgtttttattcaaaggctacgaaggtaacgaagaagcgacacgaaaagtgctgaaagacggctggttccataccggcgattccggctatgtggatgaagacggatttatctttatcaccggacgttataaagatgtcatcatctacggcggcgataatatttatcccgaccagattgaagaggtcattcagcaagtgccgggcattctcgaaacggcggttgtcggtatccctgatccgctctacggcgaaaagccgaaagcgttcatcgtgacaaacggcagagaaggcctgacagaagaagaagtgacccgtttccttcaagaacgtcttgccgcctttaaaattccggacattgagttcgtcagcgaacttccgaaaaacaaccttggaaaagtgagaaaagacgtgctccgcaaacaagcggtccgttcataattgaaaacaaagacccggctgcgagccgggtttttttcttgcgttccatgtgaaacattttactccgaaaacattttgaactgtctcaatcatgtttatccggaagactgccgaggtagacaagaaatatgagatcgaacaagaaggaggaacttgacatggaaaactatccgaaggaattcccggcggaatcacaaaaccgccagccgggcattgagaacgaaatgaatccggcgcctgtttacgaatacaaagaatataaaggcgctgacaaattaaaaggaaaaaccgcacttatcacagggggcgacagcggtatcggacgcgccgtagcggttgcttacgcgaaggaaggcgcaaatgtcgcgatcgtctattttgatgaacacggtgatgcggaagatacaaaaaaacgagtggaagaagaaggcgtaaaatgtctgttaatccccggcgatgtcggtgaggaagacttttgcaatgaagccgttgaaaaaacggttgaagaattcgggcgtcttgatattctcgtgaataacgccgcggaacagcatccgaaagaaagcattaaagacatcacaagcgagcagcttcacagaacctttaaaacaaacttttactcacaattttatttgactaaaaaagcgattgattacatgaagccgggcagcgcgatcattaatacgacatccattaatccttacacaggcaatccgcagctgattgactacacggctacgaaaggcgcgattaacggttttacgagatccatggcgcaagcgctcgtcaacgacggtatccgtgtcaacgccgtggcgccgggaccgatctggacaccgcttattccggcgacattctcagaagaaacagtcgcttccttcggtcagactacgccgatgggccgggcaggccagcctgttgaacatgtcggctgctatgtgctcttggcctcagacgaatcatcttatatgaccggacagacgctgcatgtcaacggcggcaaatttgtgaccacataagggggctgaagcatgacgatatcgaagcatgacgtgaatgcatactatcaaaaagcgggaatcgttctgactgatgatgaagtcgaagacattcaaatcatggattacggcttaggcaagcttaaggaaaccgggcttcagctgtttatttacgtgaataccgaccgctactgttcgaaagaattggtgctcttcccgcgccagacgtgtccggaacaccgccatccgccggtcggcagcgagaagggaaaacaagagacattccgctgccgctgggggaaggtgtatctctacgtggaaggcgaaaagacagagaacccaagcgtcctcccgccgaaagaagacaaggaatactacaccgtctggcatgagattgtgcttgagccgggcggacaatacaccattccgccggatacgaagcattggtttcaagcgggagaagaaggggcggtcgtcacggaaatgtcatcgacaagcacggatgatcacgatgttttcaccgacccgcgcatttaaggatgaggctgcacgcctcatctttttttgtatggaaaaaagtgaatttacctgtataatggctaataaaggaaagaaggtgcggtcgtgttttcctgtcaaatctgggaacatctgaagatcagattgcttgctaaagaagatacggacgaattgtattctgttatgaagcgaaatcaaaaccatctcagcgaatggctcagctgggcggaagaactggctgatatcgatacgtaccgagatgtgatcatccccgaatggcgctataaatacgcggaagagaatgggtttgacgccggaatttttgtgaagggccggttttgcggcatgatcagcatccataatgccgatccagtcaatcaaaaagcagagatcggctactggctggatcgagagcatgaaggattcggcattatcaccgcaagctgccgggcggtcatcacccatgcatttcaggatctcggcctgaaccgcatcatgatcagcgcggctgaaaaaaacacgaaaagcagggcggtggcggaacggctcggatttcagaaagaaggactgacgagagaaggcattttcgtacagggcgcctatcatgacacggtgaactacagcatgctgaagcgggaatggagcgaagatcggcagaagagcacatttcttggtttaaatgtctccccaatgtggaaaagtaacagcggagacgttaaaaaggagtgattcttcatgaatcaaaatgaaatcaaagaaaaagtgcttgaagtactggatcatcataaagtcggttcgcttgcgacggtagagcaaggcaaaccgcattcacgctacatgacatttttccatgacggcttaacgatttacacgccgacgagcaaagacactcataaagcggaagaaattgaaaacaatccgaatgttcatattctgttagggtatgactgtgaaggattcggtgacgcttatgtggaagtggccggaaccgccaaactgaacaactcagccgatttaaaagaaaagctgtgggatccgaaactggaacgctggtttgacggaaaagacgatccgaaccttgtgattctggaaattgaaccgaagcagatcaagctcatgaacgcgggtgaaaaaacgccggccgagctggaactttaataaatcatttgattattcaggggcaatctgttatacttaattgctaagtgacaacatgcaaataaaaaagaaagtaaacttcttttttctgttttgatatagaagcttcaggcttcaacggacagcttgaaaaaaagctgagcttattcttttccttctgacattcgcccctaacgaagagatggaaaaaagactttttgttttacaattcacaccggcgcggcttcggagccgcagtgacgattgagaggtagggctttcgttgtcttgtgttcaagaacttccatggtgtttactttcgaagaatgattctgtcggaactgtttatacgaatcacccgcgggctaaggcgggcaaccatatattatttatttgcgtaagaaaagaataagacaaaaaccgcgccggacatccgggcggtttttttatgtaaccggccgaaacctcgccgcagtctgcagagtctaatcagtagaaaagatttggaggaatcatacattgcacgttattacttcacaagtactgtttatcttctgttttctgctgctgatacattcggttgaaacgcttgcctatgcaacacggctttccggcgcgagagtcggatttatcgcgtcagcgctgtcattatttaatgtcatggtcatcgtgtcgcgtatgtcaaacatggttcagcagccgtttaccggacatctgattgatgccgccggatcaaacgccctgtctgttgtgggcgctcagtttcgatttttaatattcggctccacggtcggaacgatactcggcatctgtcttttgccgacattcgtcgcgttattcaccagggcgattatacacttggcggacggaggaggctccgtcatgcaggtatttaaaaaaggattttcactgaacgggctgaagcatgcgcgttcttatatcagactgccgtcagtctcctatttaaaggggcttcaattccgaatgatcccgaaacgcttgtttgtcattaatatggtcattacgtctatttacacgatcggtgttctgtccgctctgtacgccggccttctggcgcctgagcacagcacgaccgccgtgatggcatcaggcttaatcaacggagttgcgaccatgctgttggctgtgtttgttgatccgaaagtatccgtactggcagacgatgtggcgaagggcaagcgcagctacgtctccttaaaatggacatcattgacgatggtgacatcaagggtggcgggcacgcttctcgcccagctcgtgttcatccccggcgcttattatatcgcctgggtgacgaaatggatgtaacgcatgaaaaaagctcctcttctgcagaggagcttttttattgataatttctcaggccgcgatcataaataaaattaccgaacggaataaaggccgcgataaaaccggcggctgaccatttcacatgccatttgacagtaaacgccgcatacgccagcaccgccagataaatgataaacaaaccgccgtgaatggaaccggcaatggtgacggcgagcggatgatgagcccaatacttcagcggcatcgcgataaacagcagcaccaaaagcgacattccttcaataaaccccatcgtgcgaagtctgccgatcggcgtgtgtaacatacagctccctcctgtcggacatcttttttcctctatactataagcaaagggcagtcctaatatgaccatttcgcgtcagttcctaaaaaacctttattaattcagcctgttgttcttgtcatttttcggatttctcttgataatatagccaaaagggtaaggaaggactacagtcatgaaactagataatgttgatctgagcatcattaaagagctgcagcgggacagccgcctgtccatgcgggagcttggcagaaaaatcaaattgtcagccccgtccgtcacagagcgtgtcagacagcttgaatctttcggcgttattaagcgctatacattggacattgatcaaaaaaagatcgggcttcccgtctcctgcattgttgaagcgacagtgaaaaacggaaaatacgatcaattcaaaacctacattcaatccattcccaacattgaattttgctttcgggtcgccggcgcggcgtgttatatgctgaagattaacgcggacagcctggaaacgatcgaacacttcatcaaccgcacctctccgtatgcccaaaccgtgacccacgtcattttctcagaaattgacacaaaaaacgtcctcgattagagagagcgtgaggaagtctgttataataacaggatgattgtgaaagaaagagaagtgaaaagcatgtcaaaaacagttgtattagctgaaaaaccttcagtcggccgggacttggcccgcgtgctgaagtgtcataaaaaaggaaacggatatcttgaaggcgaccgctacatcgtcacatgggcgctcggacatctggtaacgctcgctgaccctgaaggatacggcaaagaatttcaatcatggcggcttgaggatctgccgataattccggagcctttgaagctcgtcgtcattaaaaaaacaggaaaacagttcaatgcggtcaaagctcagcttgtccgaaaagacgtcagccagatcgtaatcgctacagacgcaggacgggaaggggaacttgtggcccgctggatcatcgaaaaggcaaacgtccgcaaaccgatcaagcggctgtggatttcctctgtgacggataaggcgattaaagaaggatttcaaaagctccgcaacggcaaagagtacgaaaatctgtatcattccgccgttgccagagcggaagcggattggatcgtcggcatcaacgcgacccgcgcgctgacgacaaaatttaacgcgcagctgtcatgcggacgcgtccagactccgacactggcgatgatcgccaagcgtgaagcggacattcaggcgttcaaacccgtcccttattacggtctccgcgcggcggctgatcagatgacgctgacatggcaggataaaaaaacaaagcagactagaacattcgatcagacggtgaccggccgtttggcaaaagacctgcaaggaaagccggcagtcatttcagaattgaaaaaaacggcgaagaaaagcttcgcacccggtctttacgacttgacggaattgcagcgggacgctcataagcgcttcggtttctccgcaaaagagacgctgtccgtgcttcaaaagctgtatgaacagcataagcttgtcacttacccgcggacagattccagattcctttccgcagacatcgtgccgactttaaaagaccgtttaaacggcatggaagttaagccgtacgcgcaatacgtcaatcaaatactgaagcggggcgtcaaagcgcataaaggattcgtcaatgatgcgaaagtatcggatcaccatgccattattccgacagaggagccgctgatcctttcaagcctcagcgacaaagaacgaaagctttacgatctgatcgccaaacgttttctcgccgtgttaatgccggcgttcgaatacgaagaaacaaaggtcacagccgatatcggcggcgaaacatttaccgcaaaagggaaaacggttcaatcgcctggctggaaagccgtgtatgatatgtacgaagatgacgacgatcatgaggaagacaaagaccagacgctcccggatcttcagcagggtcagcgcctcactgtctcatcattgaaagaaacgagcggacagacgaaaccgccggcgcgctttaatgaaggcacgctgttatccgcaatggagaacccaagcgcctttatgcagggagaagagaagaaccttgtgaaaacattgggtgaaaccggcggactcggaacagtcgccacccgcgctgatatcattgaaaaactgttcaatagtttcttaatcgagaaaaaagaaaaagatattttcatcacgtcaaaagggaagcagctcttacagctcgtcccggaagatttaaaatcaccggccttaaccgctgagtgggagcaaaagctctccgccatcgcagcgggtaaactgaaatccgccgtgttcattaaagacatgaaaacatatgcgggcaaaacggtgaaggaaatcaaaaacagcagccagactttcagacatgacaacatttcaggcaccgcctgccctgattgcggcaaaatgatgcttaaagtcaacggcaaacgcggcacgatgctcgtgtgtcaggatcgggaatgcggcagccggaaaacgctggcgagaaaaacaaacgcccgctgtccgaactgtcataagaaaatggagcttcgcggccagggcgaaggccaaaccttcgcatgtgtatgcggccaccgggagaaactgtccgtctttgaaaagcgcaaggcgaaagataaatccggacgcgcatccaagcgggacatcaactcttatatgaaaagccaaaacaaagaggagccgatgaacaacgcgctggcagaacagctgaaaaaactcggcctggataaatagatcagtgaaaggcagcatttgtaaagaaatgctgccttttgttgtgtttttaactgtaatgggaatacgatccagacgaagaggggaaaggtgagcaggcggcgctcccatttaaaattttccaatgtgaaaaaatgctagtattcttttatcgtttcctatatagtaaaaatactttgtgaaaaaataagatatgggtctaaaaaagggtttataaaataggaggatggactgtgaagcaattcgtttttcgtctgatgatccttttgatttcgatcgttctgacggcggggtgcgcggaggccggcactgaaaaacaggcggcggccgaaccgtccggaccgcttcagcccgcagagcattttatttatcataaattgatgaacgggcgggggatgatccggacgaacatatccggtgagccggaatatttatctgagtctctcggactatggatggcatttttgctgaacaggaaagatgaacggcagtttcaagcgcaatatcagcttctcaccgattcgtttctgacgaaaaacgggctcgtgtcgtggaagattgacgggaataaagcgagcggcaccaatgccttaattgatgatttcagaattatgaactgtctgaatgaggccggaaccctgtggggaaacagtgaatacgggaaaacgtcggtgcagatcgggaaggcgctggaaaaatacaatacgaatgacgggtattttacggattattatgatgccgcttcaaatgccgcgtcaaagaccgtgacgttgtcctatgtcgaccccggcgccttacagatgctcagagaaaagggaattatcgatgagaaaacggaaaacctgaaccttgatgttctcaatcttgcgcccctgaaaaatggttttctgccgaaatcgttcaataccgaaactaaggaatacaaatatgacagcgaagtgaatatcatcgaccagctgtacgccgccgtgaatctgaagcggggcgatggcaaagccgctgtgctgtcgaaatggattataaaggaatttaagtcgcgcggacagctgtacggacgatacagcgcagacacgaaggagccggcggttcaatacgaatcaccgtccgtttacgccctggccgttctttttttagcagaacaaaaagctgatccggctgtcatcaagccgctttatgaaagaatgacttcatttgaaacactggacacgctgaaacctgattacggcggctatatgagcggggacgatacacattctttcgataacctgctgccgcttctggctgaaaggaaattgtttaatgaaaatatcattcaatgaatcacaaaaactgtgcagctacacagcagttatgctggtgctgctgtctttttttatttactatgcgtctcagcaatccgcagggcttctgataacctgcatcacattgcttgtcacgggagccggcatatggttcggggcaatctacgcgctcgtcatcaccttactcgtcttatttgttctcggcagcctgctcctgtggtttcagaccgggagctttatggcgtctgccggtgccgaaagtctgcaggtgctggtcatttgggggattgcgctgctgctcttttcttacatagcgggaaggattcacgagttggcgaaggggcttgagcgctcagtgaaacagctgcgtgaagagattacgagctttgtcgccgtcgacagggtgaccggctttgacaaccatctgcggatgaagctggagctttctgaggaaatcaagcgggcggaacgctacggcaattccttcgtctttttgctgctgcacatgcattatttcaaagaattcaaatccctctacggagaaaaagagaccgatcggctgctggcgtttatcagccgccaaatccggtcaagcgttcgggaaacagacaaaaaattcaggccgtccgccgaacggttcggcatcgtgctgacccatacgcctgaagaaaacatgccggccgttctggcgaagctgaaaaaggaattggatacgtaccggctgcaaaacggtaaatacgtctccatcaccttccgtgtatgttacttggcgtaccgaaaggatttacaaacggccgagcaatttttaaatgaactggaaaacgagatgatgatgaatgaactctaaatggatacgtctcttactctcggcgctcttcatgatttcggcggtttatgttcccctcacggcggaagcaaaagacaaaaaggacggcattctcattatttatacaagcacggacggcaaagaaaccgctgaggtcaaaatgcttgatctgaccgcgggccatttctcatccgccgtcaccgtgaaaagcgacggagacatcacagcagccgatctcaaaaagaatcggcgcgtcatctattacggcgtcacgaaaaaaaagctcagcacatcatttgtgtctctgatcagcagtatgccgcagcagcttatcagcatcggctataacgctgggcagttccgccaatttgcgggtttgtccctggcagaaaaagaaacggtatactgcatttacagcaaagaagaaaaaacagacatgccgcttgaaaaagggatgtccgtgctcggcgtatcgggagtaaaaggggagcccctttatacataccggtccggtgacggcagcacccgcccttttatgtggaaaacggcgcgctctgactattatttcggtgtgacgagcctgttaaatgattcgtttctgacggcgaaagcgctgcgcaacgcattcggagaatcagaggacggcaccctcctttatttgcggcttgaggacatcagtccgatgtcagatgaaacattgctttacgaagcgggcgcttacctgcataaaagacacattccgtttattctggcggtcattccggtctatctcaacccggaaaacggagaaaaagtatacctggcggacaagccgaaaatggtcagcgtcctgaaaaaacttcagcaaatgggcggcagtatcattattcacggctacacgcacgcataccgatacagcgaaacgggagaaggctttgaattttgggatgccaaagcggatcagccgattacgtcagaaaatgcggatgatactccggtcaagcttgaaaaggaacaggattttccgaatgaaaaagcgtaccgggcgtatgtgaagcctttccgtgaaaaagaaaacatctacacaagaacgaagctggagcaggcgattgacgatctgacagagctcggcctttacccgctgtcattcgaagcgccgcactatacgatgtctgaagaaggctacaaaatcgcatcttcttatttctccagcattttcggacaagtgcagctcagcggcacgacgtggaaaacctcgggcgcccctccgttcgtctcaaagccggctatgctgcacgggatgacgctgtacccagaaacaatcggttatgccgatagctcaaaggaaaatccgctcggagatatggagaatcatatttcgcagatgattgatttcggcggcggaacggcgggcggtttctaccatccgtatctcggcatgaaatacctccccgagctcgtcaatcagatggagcggattcccggcggcgagtggctcgatctgaagaaaacgaagcaaacggtaacgtcggacagcgtcaggatcaaaacggacggagacggaaccattcatgtggaaaacaagattcatccgataacggcctttttcaatcaccatcagcagacgcctctggaaaaagcgctttggattctctccggcgtggtgttattgtttatcatcatgttcgcctgctacgttctatatttgcgcgccacattaaaaaaacgaatctttaaggagagaagaacccttgagtaacattctgttttttatctcattaagtttaatatgggtgatgcttctctatcacatgtttctgatgcagggcggattcaggcattatatgaccttcgaacggaacattccgaaatggcgcgcaatgatgggggagctcccgaaggtcagcgtgctcattcccgcgcataatgaggaggtcgtcatcaggcagacgctgaaggcgatggtgaacctgtattatccgaaagaaaggcttgagatcatcgtcgttaacgataattcctccgaccggacgggagacatcgtcaatgaattttcccgtcagtatgacttcattaaaatggtcatcacaaagcccccgaacgccggaaaaggaaaatcttcggcgctgaactcagggttcgcggaatcgaacggagacgtgatctgcgtgtatgatgcagacaatacgccggaaaaaatggcggtgtactacctggttctcggtctgatgaatgatgagaaagcgggagcggttgtcgggaaattccgtgtcatcaatgcggccaaaacgatcctgacgaagtttatcaatatagaaaccatctgctttcagtggatggcgcagggcggcagatggaaatggttcaaaatcgccaccatcccgggaacgaacttcgcgatcaggcggagcattatcgaacagctcggcggctgggatgataaggcgctggcggaggataccgagctgaccatccgcgtgtataatctcggctaccatatccgctttttcccggcggctgtgacatgggagcaggagcctgagacatggaaggtctggtggcgtcagcggacaagatgggcgcgcggcaaccaatacgttgttctcaagtttttatcccaatttttcaagctgaaacgcaagcggatcatcttcgatctgttttatttcttttttacgtattttttgtttttcttcggtgtgatcatgtcaaacacgatttttatcatcaatcttttttacgacctgcatctggcagtcgggtttttggcgatgattttgtggatactggcctttttcctgtttatgactgaggtcatgattactttaagcattgaaaaaacagaaatgaacaaacaaaacttctttatcgtatttctgatgtactttacatactcccaggcttggatcgtgctcgtcatctggtcattattcacagagattaagcaccgcttgttcaagcaggaagtcaagtggtacaaaacggagcgatacaatcaaaataaaagcgggtgacctttttgaaaaaagcgatcatattgataactggccttttgctattgatgtataacgggcaggcggccgcggcccgggaactgaaaacggacggttccgccctcggaacaagcgccggcgcaaaagagcagcaggcgctgaccggcgatctgatgacactgtacggggcgaaagacagcgcagagctgacctatcagattcctgcgggagcttcgaatgccgatcagtcgcttctgattgattacgaggcgtcaaacttattaattgccccgtcttctttaaccatcgccattgatgatgaacccgtcaaatccataaagcttgacggcagttccaagcggaaaacggtgaagctcaatctcagcaaaagccaatccgcccaaggctatcacaatgtatcattacgattttacggcgtattaaaagagggcgtctgcgtcaggcaggatacgtcaggcaactggataaaaatttatccggacagccgccttgtgctttcagaagcaagcaagtcaaagggagcggatctcggccatttcccgtatccgtttgcccaatcaggcaatacgggtgaagaaaccgatattatccttcctgacaaaccgacctcggcggaagctgaagccgcagtcaaaacagaagcatatctgaaaacggcagacagcaggctgaaggtatcctatgtaaaagaatccgacgccggcaaaatcagcaatccgtcaattgtcatcggcgctgatcagcattggaacgggaaaataaaagagcttttcgaacgggggaacatcaaagcggaagacaacaaacttcttctcgctgaacgggttctgacatcaggggacaaacggcagcccgtcctgtttgtcacggcgcaatcagacaaaacgctggcggataaaatccgcgtcatcacagacagcgcttattcaagccagctgggcggagatactttgacaatcggccgccttcagcccgctgcggaaaagacaggcaataaactgacactagaggacttcggcgcgggaaatgtaacggtcggatcaaacaaaacggcgtcagagcacttcttttaccctgcggcggccgctgttgataaagacgggaaggtcaagttttcgctcacattaaagacgtcggaatcggtccggacgaaggcggattcagatgatgatgctgagagagcggaactgaacgtcatggtcaacggacagccgaatgcggtgcgtcttgatgatctcggcaatcaagataaagacggcttttaccacgtctcaatcccgattgatccgaagcttttgcgaagcagcaggtacattgatctgcaatttgtcacatcaggtttgaaacataacaatccgtgtatcgaccgtgacgaaaacaaatgggtctatattgataaaagcagcacgctgacgtatccggtaagcgatgcggcgcagaaagcggacttcgggcaatggccgctcccgtttgcgggcggcgggaaagagaaaacagtgatcgtcatcccgaatgacgtaaacatgcagacactgaaagaactttctctggtggcggattcattcggaaacggctttaccgtaaagacggcatcagacatgaaggaagcggatgccaaaggccggaatgttgtgtttatcggaggcctgccgcaaattccgcttttgaaatcaaacgcctctaagcttctcgtgccgtcagaccgcagcggagcttacgatgtttcttcgtttcagatgctgaatgagacaacgaaacaagtcgcgtttacccagaaatcaccttgggactcagacagcagtattgctgtttttgctccgttatcaggaagcggcgcggctgtcacaaaagagctgatcagctttttagacagcacaagcgatgcggcaaccgtcgtcaacgaaacgacaggcaagcagctgttttcgaaccatcagcaaatcaagtcagataacagcagtccatcggctgatacgaaaagccgttccgcaacactgaacgtcacgtatatcgctgttttcgcggcgcttatgatcattgcggccggtctgatctggctgacggcaagaaggaaaaaaagaaaaacggatcatgaaaaaagcgaagagtaatgaaggaaaaagaggccgttaacaggcctctttttttgtatttttatttccatttttggcggtgatttttttatttttgaaacagcataaaagcccctttacaactgaacgggacgggagtatgatctcttttataatctatatcgcttaatctgtaatcagagcgggggaaccaatttgcggcgcgtcatgccgcttggggtgaatcctttttcaggtagggccaactctcataagcccgaatccgacagctaacctcgtaagcgttcatgagaggagatgaatgaaacctgtgcacgattatggcgcaggggcatccgtttgcctctgtgtctttttgctgtgctgaaataaggcatgcaatcagcattcggagacatcatagcagtaagagtttgtaaatcaaacggaaaatgaaaaaaaggggaagacaacaaatgtaccattcaatcaaaagatttttgattgggaaaccgctgaaatcacaggcggccggagagcagaaactcacgaaactcaaggcgctcgccatgctttcttcagacgcgctgtcatcagttgcttacggaacggaacagattctgatcattttggctgcggtaagcgcggccgcgttttggtattccattccgatcgcagtcggcgttctcattttgctgcttgctttgattctgtcctacagacagattatttacgcttatccgcaaggcggaggcgcttatatggtttcaaaagaaaaccttggtgagaagccgggcctgattgcgggcggctcattgcttgttgattatattctgacggtggcggtaagcatttctgccggaactgacgccattacatcggcatttccggctttgcacccgcatcatttgctcattgctgttttgcttgtgattctgattatgattttaaatttgagaggactgtcagagtcggcgtccattttggcgtatcccgtctatctgtttgtggcggcgcttgtccttttgatcgtcgtcggactgtttaagcttatgacgggtcaggttcatccggccgaacacacgccgatcggcacacccgtggcgggcatcacgctgtttttgctgctgaaggccttttcatccggctgttcggcactgaccggtgttgaagccatttcaaacgcgatccctgcctttaaaaatcctccggcgaaaaacgcggcccgcactttggccatgatggggattctgctggcgatcttatttacggggattacggtgctggcgtacggctacggcacgggaccgaagcctgacgagaccgttatttcacaaatcgccgcggaaactttcggccgccatacggtgtattatttcattcaaggcgttacatccttgattctcgtgcttgcggcgaatacgggcttttccgcttttccgcagctggcgtttaatttagcgcgcgatcagtatatgccgagaatgtttacggtacggggcgaccggttaggattttcaaacggaattatctttctcggtatcgcgtccatcttgctcattcttttattcgggggccgcacggaacatttaattccgctttatgctgtcggcgtgttcattccgtttacgctgtcgcaaacgggaatgtgcatcaagtggatcaggcagaagccgaagggctgggcggtaaaaatgctgatcaactcatgcggcgccgccatttcatttatggtgctgtgtattttattcgcgacaaagttcaatcttgtctggccggtgctgttattcatgcctgctgtcgtcatgctgtttttcgtcattaaaaatcactacaccgcggtcggcgaacagctgcgggtcgttgatcagcagcctgaggaaatcaagggaactgtcgtcatcgtgcctgtcgccggtgtcaccaccgtcgtccaaaaatcgattcagtatgcgaaatcattatcggatcaggtcattgcggttcatgtttcctttgacagagaaaacgaaaaaaaggtggaaaagcgctgggaagagcttcataacggcgtccgcctcgtcaccctgcattcctcataccgcagtttggttcacccgtttgataagtttttagaaacggtcgaacagaaagcgaaaaaagaacagttctccgtgatggtgctgtttccgcaatttattacgaagaaacgctggcagaccatccttcacaaccaatcagccttcttgctccgcgtccggctgttttggaagaaggacatcatcgtcgccaccctgccgtatcattttaaaaagtaacggcaaagaccgcaggctgaaatgccgcggtcttttttgtaaaggaggacgacatggcacaaggcgcttttgtcatcatacaaaatgacgggcgggacatattgctcgtaaaacgaaaacattcccttatgggatttgcccggcggcgggatcgcagaaggtgaaacacctgaagccgcagccgtcagagaggccttcgaagaaaccggttataacgtgaccatcataaaaaaagccggtgagtatgaaaggccggcatttgaagatacacagcacgttttcatcggagccattaccggaggaactccgctgatgaacgggccggaaaccgccgccttacgctggttttccccaaaccggctgccgctgttcatggtgccgaacagaaaacagcaaataaaagacggactcaatggggcggcaaatcataaggcagtccttaaagaccggaatctgttatccatccttgatctgctaagaaaaaagctgagagtatagcccgtgtttcaacccgtttgaaaaaggggatgaatacaggtaaaaggaggatgcagtatgccaagtaaaacagcaggacacgtaatgacggagctgcttgaacaatggggagtcggtcatatatacggcattcccggagacagcattaatgaatttatcgaagaactgagacatgaacgaaataacctgacattcatccaaacccggcacgaagaagtcgcagccctggccgccgcggctgaggcaaaactgaccgggcagatcggtgtctgtctttcaatcgcagggccgggggccgttcatctgctgaacggtttatacgacgccaaagcggacggcgttccggtgctggcgattgcgggacaggtggcttccgatgaaatcggccgtgacagctttcaggaaatcaaattagagcaaatgtttgaggacgtggcggtgttcaaccagcaagtacatacggcagaagcgctgcccgatcttctgaatcaggcgatccgcacggcttacagcaaaaaaggcgttgccgttttaaccgtttctgatgatttattcgcgcaaaaaatcaaacgggagccggtttatacatcgccgatatacctcaaagccgatatagagccgaaaaaagaacatctcgtgacatgcgcgcaatatattaacaacgcaaaaaaaccggtcattctcgccggccaagggttaaaatcagcaaaagaggagctgctcgcattcgccgataaagcggccgctccaattgtgattacccttccggcaaaaggcgtcgtgcctgacagccatccccactttctcgggaatctcggacaaatcggcacaaagcccgcctacgaagccatggaggaatgtgatctgctgattatgctcggcacatcgttcccgtacagggattatctcccagatgatacgcctgccattcagcttgattcggatccggcgaaaatcgggaagcgctatcccgtcaatgcgggaattgtcagtgatgcggctctggggctgaaagagctgacggaatacattgaatataaagaagacagaagatttttagacgcctgcaccgagcacatgaagcattggtggaaggaaatcgaaaaggatgaaaccgaagcgactcatccgctcaagccgcagcaggtcattgcccggcttcaggatgccgccgcagaggacgctgtcctgtcggtggatgtcggaacggttacggtgtggatggcccgccattttaaaatgaagaagcaggactttatcgtctcaagctggctcgccacgatgggatgcgggcttccgggagcgattgccgcaagccttgccgaacctgagcggcagtccatcgccatttgcggagacggcggattttcaatggtgatgcaggacctgccgacggctgttaaatacaaactgccgattacggttgtcgttttaaacaacgaaaatttaggcatgattgaatatgaacagcgggtcaaaggcaacattgactacgtcacccagctgcaaaatatggattacgccgcttttgcagaaagctgcggagcaaaaggcatcaaagtgacgaaacacgaggaattggctcccgcttttcatgaagcgctcaactcaaatgagccagtcgtcatcgacgccgtcatcggcgatgagccgccgcttccgggaaaaatcacttacggccaagcgaagggcttcagcaaatacatgctgaaaaacttctttgaaaaccaaaaaatcgaaatgccgtcactcaagaaaagcttaaaacggctgttttaaaaaagccggcgcttacaaaaaaataaacaggcagcatgcctgtttatttttttgtttgttgaggcgacttggcttgcatatagccgtcctaaacggaaacggagattgtgaataaccacagctggcgagcgatggctgataaaaaacttaagaaggaccaggacagttcataacaaacgtggttcgcacatcagcatcgcccagcccttatcagcaaaaacaggaactaagaccagcggggcgacgtacaccgtcaagaaaggcgatgctctttctgtcattgcacagaaaaacggcgtgagcatggccaccctgcaaaggttgaacggcatcaagaatccgaattttatcaaagtcggccaagtattaaagctgacggattcggccagcccccaacaaaaggcaaaaaatcatcttacacgctgccttcaggcgtttttaaagtgacaagccccttaactaagggaacgtccgtgaaacagatacagacagctttggcggctctttattactatccggacaaaggggcgaagaataacggaatagatggtgcatacgggtcgaaaacagcaaatgcagtcaaacggttccagtccatgtatggattgactgctgacggcatttacgggccgaaaacgaaagcaaggcttggagaaatgttaaaatggaaataaaaaagcaggctctaaattgcctgcttttctttttattagcctaatttctcttttgagatcttatccaaattagtaaaaagtatatccaggcccgaaaataagaaagttatgaagaatgaaagaagaatttctccaccttgaaatatagatatgttttcaatgatattattggaaacatatttaattgagaagtaaacagcagcccatgcaaaaatgaattcaagtatataggctaaccaagtaggtaatttaaaaatatgagtaattccttttacaattgccataaggattagcatataaattaaagctaaaatacttacgacgacagaaaatatgtataagtctgaaagtgaaccatagatgatatactctccgaaaaaatgatttacagttatagctacaaaataaataactaggctaggtacagttatagcgaagaacagggagaatccaataagccctatgaatgctgcatgagctaagtggttgggtggtgtatccacaatctccttttttaatagaatcataaaaataagagatgaaataacaagacagcatagtatggtgagcaatacggtaataaagatagccatgttaacctccaatgaaaaagtgctattagagtgagtctaacagcactttaaattttaaatatgttaaatcaaagcaacaatgaatttagctaaagtggtagctacatctgtaggagctccgatagctttaaaagcttttgtaaattgttttacaccccaattttcacctttatccataatgtcggcaacctttttagaattttttctaatccatgccgcagctttaggggagaaaggctttaaggcttttgataaaagccatccacctgaacggcaggcagctctgaaagccttataggaccatgaaactacaccttgggtttggtagtcaccattgagagccgctttggttggaatagtgccaggcattccagttggaatagttcctggtgcagttttcgttaccggtacaggagttgcggttctgttttcagctgctaaagcacctgaagtacccaagaatgatgtaagtagagttgcgcttaaaactacaggaattactttcttcttcatatatattttcctcctaataatttatgaataataataaaatgtttcatcgctaacgttgtccaatgagcgaggcttttagccttgtcagaaagtccagactttttaagtgaaagataaatatcctctccatgtcagtacaactcaaggaaacatattcgtttaatagcttctttaaaaccagttcaagctaaaagggaaacggcttatcaattattataaaaaattggtttggtaattccagtggcattagtagtaatatcacggttttcttcagctaaggatgtggggacaaaagaagtagttacaagagctaaagatgtggcaaatagaataccattagctacgggtttaaagaaaaaccctcccttaggaatgtaatctgccagcggaatgcaagactatgtatttaggatagtcctatattctccgctttgaatatttttccacctccttcagataccattctatcaataggtattttttgggtaaatagtatttttatacagtatttaatgttgagttataatttacctgaggcttgtttaaaaacaagttaatcaaagtgattatgacgcaaaagagaattgcggttttttttcgttttcactttttgttcaaatagttataatattacaaaaatagtgattagagggagaggtatatatggatcaagttttgccgtcgtcccaagttggtgtcaagatcaatgaatggtacaaaatgattcgccagttcagtgtgcctgatgctgagattttaaaggctgaagtagaacaggaaatagaggagatggaagaggatcaggatttgcttgtcttttattcattgatgtgctttcgtcaccaattgatgttagattccttggagccggaagacagatatagagatcgccctacagtcgacgaactgcttgaaaaaatagaaaaaccacaaaaaagacttacaggcctcttgaaatattactcattgttttttcgtggaatgtatgaatttgatcataaagagtatgttgaagcgataagctattatcgcaaagcagagagagagttgaatgctgtatcagatgaaatggagcaagctgaatttcattacaaaatagctgatgcctattatcaaattgatcagcactttgtttccctcaatcatttaaaaaaagccaagcaattgtttgaaaaaagtcaactatacaaagtgaaagtgattggctgtaatatgatggtcggtgctaacatgtacgatatgtacaggctgacggaggcagaatcatattatcgggaagcattaagtatcgcccgtggcttggatgaggaaaaagtgaaaagaattatcggagtgatctttcataacttaggcttagtttatttaagagggaaaaatttgattgctgctgaagagaatttcaaaaaggcaatagacgtgaaagaacatattgatacagtgtatggagtgagatcattatatatgatggcgaatgtcctgtaccaatgtgataaagccaaggaagcacgtttcttttatgaaacggctctaaatcgtgctcggacttctaatgaagaagaatatttggctaaattaaaaatcattaattcattatacgaagaatataatgaaacagcagtgaaacaaagcttaggctacttagaagggaaacgcctttggtctgatttcgcagagctgactgaaaaattaggtgactttcattttgagaagagaaactatgcagagggaagaaactttttaaagaaaaccatacacgcccaaacacaaatacttaaggttacggaggctatataatgaaaaaggttataatcagctccgctttaatcgctattcttttcactggattattaagtgtaacaaatgtttatactgctgaaatgagtgattctggaactttccacatcgctgaaaaagctataaatatttaagtattctccaatttttgacctccatcttttaagactgggggatttctttttcttatccagtaatcaacatacgcagcctcataaggttcttaagcgttacttgtattgcgttcacttttccgttttgctgtgatgatttcttgaacgatgcatgcatgagaaagacgccgtccatttttaagcctttcttcaatcattcaaggaaaaacaaaggagctatcgagaagatttcgaccttgataaacaggctgcatgcctgtttattttttttgtttgttgagcgacttggcttgcatttagccgccctaaacggaaacggagattgtgaaaaaccacagctggcgagcgatggctgatcaagaaacttatgaaggaccagtgctcagtgcaattcatctcaagaacagccagagagcggtcacaacagcgatcataaagtaatctccctcattcagtgtagttccatttttgacaaacacatgtgccgtccggtttgtctttgtccctttcaaggttttaagcgcaatgttcttccctatattgtaataaacaattttaaatagataatatgccagcgaacagagtaaaaagagcaacatgaacttgccaataaacaatatcatgttttattactcccttttgcagttttttcgtatgaatatatgacggaaaagtcaggatgttatataaaaggagaagtattttacggagactggtgttattcattaatgaatggctcatcgaaacatctccagatccggaatcatttcaaaacgaaagagaagcccgaggattattaaaaaacagtccctaatttgtccgcttttttttgaaaatatgatccaagatgaacataaagagggtgaataagaaggacaccgtaatcatatctatcagagatatattagaggttctttttattaacagcagccataccacctgcaaaacgaaataaatagaaaaataggatatatatgtcatgatcctcatatttgttacccccttagcctaatttctcttttgtgatcttatccaaattagtgaaaaggatatccaatcccgaaaataagaaagtgatgaacaatgaaagaagaatttctccgccttgaaatatagatatgttctcaatgatatgattggaaacgtattgaattgagaagtaaacagcagcccatgcaaaaatgaattcaaggatgtaggctgaccaagcaggcaatgtcaaaacatgagtcattccttttacaattgccgtaaggataagcatataaactaaagctaagatactgacgacgacagaaaatatgtataagtctgaaagtgaaccatatatgatatattctccgaaaaaatgatttacagttatagctgcaaaataaataactaggctgggtacagttatagcgaagaacagagagaatccaataagccctatgaatgctgcatgagctaagcggtttggcggtgtatccacgatctctttttttaatagaatcataaaaataagagatgaaatcacaaggcagcataagaaagtgagcagaacagtaaaaaagacagtcatgtgacatctccaatgaaaaagtgctattagagtgaatctaacagcactttgcattacttcatacgtattttcctgacgatcatttatgaatgattttaaaatgctttcattgctaaagttgtcaattgagcgaggtttttagcctggctgtcagaaagtccggactttttaagtgaaagataaagattcttttccacgtcagcccagcttaaggcgacatactcgttcagcattttctttaaaaccggttctatgtgttcattgaaaacggattcgagttcatttcttattttctttcctgctaatttttcaacaagattgaataattttgttttatttttcagcacttctctgattacatctttgactggttttgacacagatgcatcgctttgtgctttaagtccgtaggaaaattgcgtatcagtctgataaaaaaatgatttggccgttccagtggcattggcagtattattatgattttctttagctaaggatgcggggacaaaagcagtagttacaagggctaaagatgcggcaaacagaatgcctttagctgcgtgtttaatgggaaatcctcctttagaaatgtagtgtagagagaaatgaaagactatgtatttaggcgggaccgatatgatccgctttgaacattttcccctctcagataccattctatcaataggtatttttggggtaaataggattttaatacagtatttttcttataattcaaaatcttctttagcaggattcattttggctgcagtttcgatgatgggacatgggctgaagcctatataacacatgtacaggctgtttgaggcggaatcacattatcggagcggttttataatttagggttaatgaataaaaataaacaggcggcatgcctgtttattttcgtttgcgtgaaagagcgaagaaaaacgggaaggcagagccggccaataacgtaccgaataaaaacatgcccccgatgaacacatgatagttcaccccgccgatccaaagccccgtaattaaggaaacgatgcttaatgcgatcatgaaaaagccgggaatcagacgtttcttacccgttgtccgataagcaataagagaacagaagatgccgatgacaatcggcacaatccacagataaaaaaggataaatactgacataagcaaaactccgatttttcttctatcataccaaaaacgcccggaaaaagatacgaacggcacccggcgtcaaaagaaaaaccggccgctatggccggtttttttctaacggaatgaatcgtagatcacaaacaaattaagcgcgatcactaaaaccgcaatcagccaggcaagagccgtcacccatcttcggttcgtcagggcgcccatcaggcgtttattgcttgtaaacataatcagcggcacgagagcaaaggagatgccgaatgaaagaacgacctggctccatacgagcgcttctgtggcgttgacccctgagataatgatgatcatcgggggaatgatggtaatgaaacgccgcaagtaaagcgggatacggtaacggatgaagccctgcatgataatatcgcctgacaatgtgccgacagaagagcttgaaagccctgcggccagcagcccgatcccgaagagaatggctgaagccggtccgatatagtggccgaattgctgataagccacgtctaaatcttctacatacagcccgttcttgaagaaaagcgcggcagcgacgatgagcatgcttgcgttaatcgccccggcgatcaccatcgcgatgagaatgtcaatcgtctcgaatctaaaaatctttttccgctcactatccgtttttccgacgacacggcgctgtgtcagtgcggaatgtaagtaaatggcatgcggcatcacggttgcgccgagtatcccggttgccaagagcacactgtccattccgtcaattttcgggataaacagcccttcgagaacggaagcggcgtcaggtttggcaaagaaggtttgcagagcgaaggcgatcaccacgacaaacagaagtccggcgatgcccgcttccagcgcccggtaaccccggcgctgcagctctaaaatcgcgaatgatccgatcgccgcgataatggccgcttcaaccatcggtatgccgaacagcaggttgagtccgagcgccgccccgataaattctgccagatcagttgccataatcaccagttcaccctgtatccacagcccggctgatacccatttcggataccggtctctggcgatttccggaaggtttttacccgtggcaatgccgagcttcgcggaaagaacttggattaaaaaagccatcaagtttgaaaagaggatgacccacagcagcatatacccaaatttcgaaccagctgagatattcgtagcgaagtttcccggatcaatgtaggcaatcgccgcgataaaggctgggcctaagaaaggcagaagccgcttgaatcccttgcttttgccgtcaagtgcatcctgcacggcttttgcttgcagtgattgtgctgagatgtctttgctcattatgtctcacctaaattccgatagatttttagctaaataacaaaaagtttcctagacgcaaattattttatctacatcataaatctgctattatgagatgtcaagttctttatgttcaataaaccggcacatagatgccctgttttatctatgatatgtatcccgccgaagaaaggtccgaaaatgaaaacggcatcgttccgggaaagaagcgatgccgttcgcaaagcgtgtttccgcgtccgatcatgcgcggatgcgttgagcgttcttttaaaaagatgaaaagaggacacttgctcatataacttcacaacttcctgtccgcccaactgatccttagaaaaagacgctgtatttcctccgttttcccgggtaaatagaataataatgtttctttccattggaagataaaacctttctgtaccattcaaatgacctccggaaaaactcggaccgctctgaataaacgtttgaatcaacgatatatcagtgattccagtccaataaaccgctgttatttatcaaataaagaatcggcatggtcacttgcgaagaaaagaagttggagcattagacttatttcagtctcccgggcaaaaaagtataataacgtcaggaaagctttccagccatatgataaaagagggggaattttcttggtacgtcgtttgtcgatcatttctttcgccatgatttttgctgtttctttattcgcttttggcggctctgcatcagcagcagctttcaaacctaaagctgaaccggacgtttccattttagccagcgggggtacagttggtatttacggtgctaatatgcgctcatgctctaaggtcagctgttcaacgatcacaacattctcaagcggtaaaaaaattacaggttcttgggtaaccggagaatatgttcaaggccactacacgaattctaataaatggctgaaagtcacgtatgcaggagcgacaggctacgtttcagtcaccacactatcttattattacggtttataagcagaaaaacctcgttctcttgagagcggggtttttcctttattccgattcaatttccgcgtttcgtttcatcatcgtgtttcatcagctgatcaatttcttctttagaagcgttttttttccactctttcgcctgacttgtcgcaatgggaatggcccgtccttcttcataaccctcatctaccatcgcattcgcgatttcgatcgcttttttcttcacaggttcctcgagattcttcaatgattgcggataatccttcatagaccaaggcatgtctatcactcctttatgaaaagtgtttcccgcctgaagaaaaagaaaaccgcctcatcaaaaagaatgacagctatttttacgagagaccagcaatttccgaataaaatataaaggataaagaagcaagtacagattgaatgcccaccacataaaatcaaaatcaccgataaatacccaaaaggcaatcgcttgcaggcctgaacaaaaggtcagcacaagtgatattaatgcgaaagagcgccataacgcatgtttccgtttataaagaaacaagctgtacagcccggttatcgaaatgaaaatatctaagggaaagaatgaccagttccaggccattatcatggcgttatcataatctttaaacaccatgttttttggaatccactcaaaaaaagtaacaatccaataaacgataaatccaatatctgtgatgaggaagagaacctttaaccctttcatcatctgtttctgtccgtatgaacgctgatgccgtttgatgacgtttcactttcagaaataaagtttaaggaaacaacaccgatgatgatcagaagaacagagacagcttttatgacagagaactgttcatgaaagaaaaaaattccgatcgcggaaatcagcacgatccccattcccgaccagaccgcatacgcgatggagacacttatatatttcaaagtcaaagtaagaaaacaaaggctgccgatataaaacaataataataaaatacttgggacaagttttgtaaatccatttgataatttcatgctgaccgtacccaatacttcaaaaatgatcgctaaacttaaataaatccattgcattcaacattctccttcaatcgtattattcaaaattatacaatatatagaatttgaagaaaattaaacaatggaatgttttccggataaaaaatccggccgggtgtaaaaagaaaacgccataaaggtatactatgaacaaagaaatcagaaaggacgtgcaggacgggtgacagaagagcggacagacctggaaagacaactgagagacattcaaaaatgggaaaaggcgcagcagagggtgatgttctggcaaacattcacccgcttgccgtttcagcttttggacaagctgacaccgcaatttattcagaggaaaatcggactcattctcgatgaaacgggaacgtttattcagtcaggcggacagtaccttacatcagaaaagcgcatcatgaaaaagtttcaaaaacggctgccgcacggtacatgtcaaacgcttcacgacatccgcaatgcgccgcttgccgtcatggacgaaatcgcagaagccatagcgcgtacaagcgtaaaggccgcgacggtgcagggagccgcaacgggagtcggcggtgtattcacgctggcggcagacattccggcgatgctcggcctgtccttaaagacgctgcaggatatcgcggttgcttacggctttgatccgaaagacaaaaaagaacgcgtgtttatcgtcaaattgctccagcttgcatccagtgacgtcatcggaaaaaaagcgatcctgcaagatttacggcaatatgatcaaaacgaccgcgcctatcagcgcgtcgcctcgcaaatccaaggctggcgggaagtcgtttacagctaccgcgatacgttcgccgcgaaaaaactgctgcaaatggttccggtcgcgggcatcatcttcggcgcgtccgccaaccgttcagctttagaaagcatcgcggaaacaggcaccatgctttataaaaaacgccggattctaaaacgcatgcacgatacagaatgataaaaaccacccgaaaacacattcaatgtgttttctttgtttagcagttctgaaatcgggaaaccaacaaccaacaccaattaaaggaggaattcaaaaatggcacaagataataacaaaatgagcagagaagaagcaggtaaaaaaggcggagaagcgacaagcaataaccatgacaaagaattctatcaggaaattggtcaaaaaggcggagaagcaacaagcaaaaatcacgacaaagaattctatcaggaaatcggccaaaaaggcggagaag

SEQ ID NO: 25 - DNA, 71412 bp, Bacillus amyloliquefaciens
tttttttattgcggtttattttttcagtttatcttttttcgctttttgtccgggatgaaaggaaaagtgtccggtattcagccgtgcctccgttttgactttgattcggtcatggcattcccggcacatatatgtatgaatcggacgattgcggaggcgtttggctgtcagtgtttcatcatcaatttgttcgattttgtcgcaaatggaacattttactctcattgatttttcacctctttcactatgacaagcattataacatggatgcccctcctgccaaagggaaagaaagcagcgcccttcctttggagcgggcgctgctttttaccggcggtttttcatatgatgatccgattgatcgttctgttcgttctgcagcttgttctggtctctttggttcagctgatcatcattcgattgagtcggtgattctttttcattgtcggtcacatcattcgggacttccggcatgacacgaccgacgatggcggcaagttcgtccaaaatgcctgaaacggggcggccggccttaatgtcgctgcccatgcctctcagacgggaaaccgtatcaggatcagccacgacaacggcattggcgccgtaaggatcgttttttaacgcctgggcaaccgtgtatttaatgctctccactttgcttctttctaaattgtcatccacatcgataccgacaacggagtatcttccgagtacaaccgcggtggcgtctgaaatgccggggattttttcggttacctcgacgagatgcttagcgatgtctgtccggccgggattttcagctgtctcaggagccgtatttttcacatggatcggttttgcatcgcgctgatcggctgattcgttctgaatattgcggccgcggccgtcctgtacagcagtgcagccggtaaggataaacaaggcttgtatgataatgaaaagaattcgcacgtcagatttcctccttgaatgctttcatttattttattgttgaattaaccttctatctttattcacaaaatcatatattttagcaggcatccccgttattcgcggaaagagaagcacacgatgggctttgatccttatttcaggaggctgagacttgagtaaaatttatgtgttagatacgaatgtacttttgcaggatcctaacgccattttttcctttgaagaaaacgaagttgtcatccccgccgtcgtgctggaagaggtcgattcaaaaaagcggtatatggacgaggtcgggagaaatgcgaggcacgtatctaagctgatagacgggctcagggagaaaggaaggctgcacgagaaagttccgcttgaaagcggaggaacgctcagaattgaactgaaccaccggtcatttcaccagctccaagaaatttttatcgaaaaaacgaatgataaccgcattttggcggtggcaaaaaatttaagccttgaggaggaaacgaaagaaaacggccgcctcgtcatcctggtcagcaaagatgtgcttgtcagggtaaaggcggatgccatcgggcttttggcggaggactttttaaacgacagagtcgttgaccatgatgaaatatatagcgggtacaaagatatatttatgaataaagagcggtttgcctcgttttataaaaacaaacaaatttcagtcaaggagcttcagcagcatcaggtttatccgaatcaatttgtgctgatgaaagatgaattaggaggatcttcgtctgcggtcggcatgacagataagaaaggcgagactgtaaaaagactcgttttcgatgatgagcacgtatggggcatcaggccgaagaacgtccagcagacaatggcgcttgaactcctgctgagggaagatatcccgcttgtcaccctgatcggaaaagcggggacgggaaaaaccttgcttgctctcgcggcagggcttctgcagacggaggatctcgggatttataaaaagctgatcgtcgcgcgtcccatcgtcccggtgggaaaggatatcggatatttgccgggcgaaaaagaggaaaagctcaagccgtggatgcagccgatctttgataatcttgaatttttattcaatgcgaaaaagccgggtgaacttgaagcgattttggcaggaatcggatcgattcaggtggaggcgctgacatacattcggggaagaagcattccggatcagtttattattattgatgaggctcagaatttgacgaggcacgaggtcaaaacgcttttgactcgggtgggagagggcagcaaaattgtcctgatgggcgatccggagcaaatagatcacccatacttagacagtttaaacaacggacttgcttatgttgtagaacggtttaaagaacaaaccgtctccggcagcgtgaagcttgtgaaaggtgagagatccggccttgcacagcttgccgccgatttgttataaaacttcgatttctgtgacgcccgttatcggtttttcaaagtctccgtccacgtaaaaatggaccgggccgccgtcttgaaggggtttccccgcatcactgaaatgcgcgactgcgtccatcgccttttcgagcggcacttcggttctttctgattttgaaataaatgcgcacaggacagcgctttctttcggctcggcatttgctaaaacagcgccgagcttcatggcgaagctgccgttcatcagtctttctttttcataacgtttttcgctttttaaagtcggcggcgaaatgcgcccttctctgatcacccgttccggatcaagcgtatgctcctgggtttctgcagagccgtccggatgaacgggctgatttttttcaaacggaaacttgcggtcatcgaaaatccagacactcggatcaattgtaatcgggtatgtaacattgccttttacttgaataacgctcatggtgaagcccccctttacttaaagtataaaagttttcgcatgaattgtcactttgcgtcgcaaattagatgtatacaacggcagcgaagtgaggatgatcgacatggtatgccggcattaccaagagctggacgcattagttcaggaagccaaaaaaagaaccgaagaaggcaaagtggcagactatattccggctctggctgaatctgaacaagacagcctttcggtcacgatttatcatgcggaaaatacatgtctgacggcaggagacgccgaccggacatttacgctgcagagcatttcgaaagtgctttctctggcgctcgtactgatggattacggaaaggaaaaggtgttcagctgcgtgggtcaggagccgaccggcgacccgtttaattccatgattaagcttgaaacaatgaatccgggcaagcctttaaatccgatgattaatgcaggggctctcgtcgttacgggcttaattaaagggcattcgccgaaagaccgcctggattacctgctcggattcatcagaagacttgcgaataatcaggacattacatattgcagccatgtcgcggaatcggaattcagttcatccatgattaatcgggccatgtgttattacatgaagcagtatgacatttttaaaggcgatgttgaagaggtcatggatttgtatacaaaacagtgcgcgattaagatgagcagtctggatttagccaaaatcggctgtgtattcgcccttgacggcaagcatccggaaaccggggagcaggtcattaaaaaagatgtggcgagaatctgcaagacgtttatggtgacatgcggcatgtacaatgcgagcggagaattcgcgattaaagtcggcattcccgctaaaagcggcgtttcgggaggaatcatgggcatttcgccgtacaacttcggaatcggtatattcggcccggcgcttgatgaaaaaggcaacagcatcgcgggtgtgaagcttttggaaatcatgtctgagaaatacaggctgagtattttttgaaacatttttttatcataacatctgcttaaatcctcttgcaatttcacctgataccctttatgataaatagaagaattaggtactcgcctggggaacggagggatacttttggcttcagagattatagttgaccatcagcagaaagcattcgagctgttgaagttagatgctgagaagattttgaagctgatccgagtacaaatggataacttaacgatgcctcaatgtcctctgtatgaagaggtcttggatactcagatgttcggactgtcgagggaaatcgattttgctgtccgcctgggattagttgacgaaaacgacggcaaagagctgctggacagacttgaaagagaactgtctgctttgcatgacgcgtttacaggaaaataaatgatcaaactcaaactattcaacggtttgggtttttttataaccgtaaaccgtttttttgcatcttcttttcgtaagacggtctcttaatctgcatttcatccgaaaaactataaagaaactgcgtaaattgtttatgaattatagtaaaatataatacgctataggtattaaacgtaagctttaagcaggaaagaggatgttatgtttaaaagaatgttaaaatcttacgattattcattgatatgcgctatcattctgctgtgctgtttcggattggtaatggtatacagctcaagcatgattaccgccgttatgcgttacggcgtgagcagcgactatttctttaaacggcagctgttcgccgtcatcgcggggtttgtgctgtttatcatcgcggccgtttttccgtacaaagtgttcgcccatcaaaagattcagaaattcatactgcttgcgtcagtggctgcgctttgcgcgctgtttgttttcggacatgttgccggaaacgcgcaaagctggtttaaaatcggcggaatggccattcagccgggggaatttgtcaagctgaccctgatactgtaccttgccgcggtatacgcaaagaaacaaagctacatcgatcagcttttgacgggggttgctccgccggtgatcgtcaccgtagttatttgtgcgcttatcgccattcagcccgacttcggaacggcaatgattatcggtctgatcgcgttttgcgtcattatgtgttcgggattcagcggaaggaccctgctcaggctggttctcatggcgggaatcgtattgctccttgtcagcccgatcatctatctgaaatgggacgatattttgacacccggtcgtatgagccggtttgaaagccttgaaaatccatttaaatacgccagcacatcaggcctgcagattataaattcgtattatgcgatcggctcaggcggttttttcggtctcggtcttggagaaggcattcaaaaatacggttatctgcctgaatcgcatacagactttattatggcggttatttcagaggagctcggcattttcggagtcctgtttgtcattgtactgctggcttttgtcgtgttaaaaggtttttatattgcgagaaaatgtgaagatccgttcgggagccttttggcaatcgggatatccagcatgattgcgattcagacttttatcaatctcggcggtgtcagcggcttaattccgattacaggtgttccgctgccgtttatcagctacgggggctcatcaatgttgttgttattaatgagcgccggtatattggtgaatgtcagcatgcatgtcaagtactcagaaaagaagaaaaagagggagcccgttccgtctaagggggtaaaaagacggcagacggaaaaatctgtgtatctctaaaaaacaagtgtatacacaggacggatattcctttattataaactacatatttattaggccaagggggagaaaagtttgtcacaacaatccatccaaaaagtgttagtagcaaacaggggagaaattgcgatccggattttccgggcgtgcacagaattgaacatcagaacggtagccgtttattcaaaagaagattcgggctcctatcatcgctataaagcggatgaagcttatcttgtgggagaaggcaaaaaaccgattgacgcgtatcttgatattgaagggattattgagatcgcaaaaagaaacggtgttgatgccattcatccgggctacggatttctctctgaaaatatccaatttgcgagacgctgtgaagaagagggcatcgtatttatcggaccgacgtcagcgcatttggatatgttcggagataaggtaaaggcgagggagcaggcagaaaaagccggcatccccgttattccggggagtgacggaccggctgaaacattaaaagatgtcgaacaattcgcaaaagtccacggatttccgtttattattaaagcatcgctcggaggcggaggccgcggaatgagaatcgtccgaagtgaaagcgaattgaaagaatcgtttgagcgggccaaatcagaagcgaaagccgcattcggaaacgatgaagtgtatgttgaaaaactgatcgaaaatcctaagcatattgaagttcaggtgatcggagataaagaaggcaatgtcgtccatctgtatgagcgggactgttccgttcagagacgccatcaaaaggtcattgaggtggcgccgagtgtatctttgcagcctgaattaagggacgaaatctgtgaagcggctgtggcgcttgcgaaaaatgtcggctatatcaacgcggggaccgtggaatttctcgtagcgggcggtgaattttactttattgaagtgaacccgcgcgtgcaagtggagcatacgattacggaaatgataacgggggttgatatcgttcagacgcaaatcctcgtcgcgcagggctacggactccacagccgtgccgtcaatatccctgagcagaaagacatttttacaaacgggtatgcgatacaatcacgtgtgaccactgaagatccgctgaatgactttatgcctgacacgggtaaaattatggcttaccgctcaggcggcggcttcggcgtccgccttgatacgggaaacagcttccagggcgccgtcattacgccttactatgattcactgctcgtcaagctgtcgacatgggcgctgacgtttgaacaggcatcagcaaaaatggtccgcaacctgcaggaattccggatcagaggcattaagaccaatattccgtttcttgaaaacgtggcaaagcatgaaaaattcctgacgggccaatacgacacatcgtttatcgacacaacgcctgagctgtttgttttcccaaaacagaaggaccgcggaacaaaaatgctttcctatatcggcaatgtcacggtgaacggttttccgggaatcgggaaaaaagaaaaacctgcatttgataagcctcagaccgttacgttaggtatcgaagaaaagccggcaagcggtacgaaacagatccttgacgaaagaggcgctgaggggcttgcagactgggtgaaagagcaaaaatccgtgctcctgaccgatacaacgttcagggatgcccatcagtctctgcttgcaacccggatcagatccaatgatttgaaaaaaatcgcgaatcctacggctgccctgtggcctgaactgttcagccttgaaatgtggggaggcgcgacatttgatgtagcgtaccgtttcttaaaagaagacccttggaaacgccttgaagatcttcgcaaagaagtgccgaacacattgttccagatgctccttcgttcatcaaatgccgtcggttatacaaactatccggacaatgtcatccaaaaatttgtccggcagtcagcggagtcaggtattgacgtattccggatctttgacagcctgaactgggtaaaagggatgacgctggccatcgatgccgtccgtgaaaccggaaaagtggcggaggctgcgatttgttacacgggagatattcttgataagacccggacgaaatatgatttgaaatattatctttctatggcgaaagagcttgaggcgtctggtgcgcacattctcgggattaaagacatggccggtcttttgaaacctcaagccgcatacgaacttatctcagcgctgaaggaaacgattgatattcccgttcatcttcacacgcatgatacgagcggcaatggcgtctttctctatgccaaagctgttgaagcgggtgtggacatcgtggatgtcgccgtcagctcaatggcgggtctgacttcacagccgagcgcaagcggattttatcatgcccttgaagggaacagccgccgtcctgaaatggatgtccggcaggtggaaagactgtcgcaatactgggaatccgttcgtcagtattacagtgaatttgaaagcgggatgaagtctccgcatactgagatttataatcatgaaatgccgggcggccagtacagtaatctgcagcagcaggcaaaaggagtcggcctcggtgatcgctggaatgaggtgaaagacatgtacagcgtcgtcaaccgcatgttcggcgacgtcgtgaaagtaacaccttcttccaaagtcgtcggagatatggcgctttacatggtgcaaaacaatttaacagaacaagatgtttatgataaaggcgaaacgcttgattttccggattcagtcgttgagctctttaaagggcagatcggccagccgcatggcggatttccggaaaaactgcaaaagctcgttctgaaaggacagacaccgatcacggtaagaccgggtgagctgcttgaaccggtatcttttgaaggcattaaagaagaatggaaagaaacacatcagatggaattgagtgatcaggacgcaatcgcgtatgctctttatccgaaggtgtttactgaatatgttaaaacggcagaacgcttcggtgatatttccgtattagacacaccgactttcttctatggcatgacactcggtgaagaaatcgaagtggaaatcgagcgcggaaaaacgctgatcgtgaagcttgtatctatcggtgaaccgcagccagatgcaacacgtgtcgtttatttcgaattgaacggccagccgcgcgaggtggtcattaaagatgaaagcattaaatcgtccgtacaggaaaaattaaaagcagatcggacaaacccaagccacattgcggcatccatgccgggaaccgtcattaaattgttaacggaaaccggggcaaaggtgaataaaggcgatcatctgatgattaatgaagcgatgaagatggagacgacggtacaggcgccgttctccgggacgatacagcagattcatgtgaaaaacggtgaaccgattcagacaggcgatttactgatcgaaattgaaaaagcgtaaaatgaatataaaaaacctgatccgcccccgtgtgcgatcaggttttttatatgtaaaaaggccgaagctctaatgcttcggccttttcatgtgcctcagatgttccgctgttttgattcatatcggaagcgggcgattaataataagaaatagcataagacgccgaacaggccggcaataaagagcgaatgggcaagtgcaaagccggtggccatttctgaataaacaaccatgattccggagagcgcctgtaatacaacaaaggcaagagccgctatccagcccccaagaatctgtttttgatctttgtaggagcgcaccgcatgcgcaaaagcgacaagaatccatacgaacagaagcagcgctgccgttctgtggcccatctgcacccattcctgaaaatgagacggaagcccgtggttcagcctgctgcaaagcggaacgtcagggcaggcaaggcttgatttcgtatggcgcacataagctcccgtataaacgacgatatacgtgtaaatcgaaaggccgatcatatgaaactgcattttcctgccgattctcagcggcttgacaagctttttgtctgatttatcagcttcgaatatgagcagcgtcaaaatcagaacagaagcgaaagaaatcagcgatatgccgaaatgaagcgccataacgagcgcatttgatccgaaaacaaccgctaatgcgccgagaagcgcctgtaaaaataaaaagataatggacataatggcgagaaaggttgtttcacggaaaacaggcgtgacttttctccatgcccaaaaagcgagactcagcacgagaacgattgagacaccgcttgcgagtctgtggctccattcaatgatagaagcggcgttaagctccgggaaaaaccggccgtggcaaagcggccactgccgtccgcatccgagacccgatcctgtctttgtgacaagagcgccgccgatcagcacgacgagcatgacgaatgtcgtcagcacgccgagcgctttcaaagctttattcattttacattcaccttcttaacaaactggacaaaatgatatacgtaccaagtgtaagcgaatatgtgttttgtggcaattctcaattctgtttgttcacaaaaatataatagaatcaggacttcttagataatggggttgattattccagatgggtctgatagaaataaagtaaccgctttattatgaaaccggcggatttggtaaaattcataaaaagttcacaaataaattcctgtttctcgtttaatatttaagaggatgtttttttacaggtcattatcttgtatgatagagttgcaggtcttaaaaaacctgctttaggtttgtaagggaggtttacgttatggctaattccagaattttaaacgatacagctatagacggacagattgaagagacgacggcatggaaggatttcctttcgcttatcaaaataggaatcgtcaattcgaatttaattacgacttttaccggcatgtggcttgcgttacatatatccggtctgagttttttaggcaatttaaacaccgtgcttcttacattaataggatcatctttgatcatcgccggttcttgtgcggttaacaactattatgaccgtgatattgatcatttaatggaacgcacgaaagtaaggccgacggtaaccggaaagattcagccgaatcaagcgctgtggtcaggaattttactcattgctttaggacttatcatgcttttgatgaccaccgtgatggcagcagtcatcggttttatcggcgtgtttacgtacgttgttctttatacaatgtggacgaaacgccgttatacgattaatacggttgtcggaagtgtatcaggcgccgtgccgccgttaatcggctggacagcggttgaagggcacatcggtgttgtcgcgtgggttttattcatgattttattcatctggcagattccgcactttttagcgcttgcgattaaaaagacggaagattacagagcagcgaatattccgatgcttccggtagtgcacggctttgaagtgacgaaaagacagattatcgtctgggtcgcatgcctgctgccgcttccgtttttcctcggcagtctcggtcttccgatcgtcattctcggcactttgctgaatgtcggatggcttgttctcggactgatgggattccgcatgaaaaacatcatgaagtgggcaactcttatgtttgtctattcgcttaattacatgaccatttattttgtagcgatggtggtcttcacgctgttttaattgaataatgagcttgtttgatcgccaaaacaaacaatgacaactagtaaacgccgccttgaccttttgtttaatcaggcggctttgcttttatacatagatggaattttaagtaaaaaatctcatattttaagaaatgaggaaaagaagtatttcggctggaagcagttttactgtttgtgcatctcgtactgattcaaaaaaggggttgggtgaaatgttaaagcgttggcgtcttttatcattattagccttagtgccgcttttattgagcggctgtggaaaaccgtttctgtccacactcaagcctgccggcgaagtggctgataaacaatatgatctgacggtgctcagcacacttatcatggttgtcgtcgttgcggtcgtagcagttattttcttttacgtcattgtgagattcagacggtcgcgtataggggaagacacgataccgaaacaggtggaggggaaccgttttttagaaatcacttggaccgttattccgatcctgcttctgattattcttgtcattccggttgtcatcgatacattggcgctggcggatacgtcgccgatggataagaaaaaccgtaaagcagaggatgcgctcgtgattaatgtaagggcgaatttatactggtgggaattcgagtatcctgattacgggtttgtgacaagtcaggagctgatcgttcccacagatgaacgcgtttatttcaagctgaagtcctcagatgtgaaacactctttctggattccgtcagccgggggaaaaatcgatacgaatacggataatgacaatactttctttctgaccttcgattctaaacgaagcaaagaagcgggagaatatttcttcgggaaatgcgcagagctgtgcggaccttcacatgcgctgatggatttcaaagtgaaaccgctgccgtcaaaagaatttaaacaatggacgaaagcgatgaaaaattataagcatacaacagattccggtttagccgcgcaaggagaagagctgtttaaggaaaaaaactgcctgagctgtcatgcggttgagcccaatgataaacgggctgaagcggcaagaacggctccgaacctcgctaccttcggtgaacgggtcaaagtggccggcattaaggatgcgaataaagagaatataaaagcctggctgaaaaatccggacagcattaaaccgggcaataaaatgacaggcacttatccgaagctctcggacgctgaaacggatgcgctgtatgaatatttaaaagggctgaaagcggagaacaagtgaggacagggagatatcaggggggaggtcgtaaatgatgaatacgcttacagtacagcaaagaaaaagctctttgctttgggattatttgacgacggttgaccataagaaaatcgcgattttatatatgatcgccgggggatttttcttcgtcgtcggcggacttgaggccatgcttatcaggattcagctcttgaggccggggaacgattttatgggtgcgcagcagtttaatgaaattatgacgatgcacggcacgacaatgatcttcctggcggcgatgccgctgttattcgggctgatgaacgcggttgtgccgctgcagatcggggcgcgtgacgtttcattcccatttttgaatgcgctcggattttggctgtttttcttcggaggcatctttttgaatctgagctggtttttaggaggcgctcctgatgcaggctggacgtcgtacgcgtcgcttgcgctgaattcgaaagggcacggcatagactttttcgtgctcggcctgcaaatatcaggcttaggtacgctcattgcggggatcaattttctcgccacgattattaatatgagggcgccgggtttgacgtatatgagactgccgctgtttacgtggacgacatttgtggcgtcggcactcattttattcgcatttcctccgctcaccgtcggtttggcgctgatgatgctggatcgtttgttcggaacgaatttctttaatcctgaattgggcggcaatacgataatctgggagcatctgttttggattttcgggcatccggaagtatacattttaattcttcccgcctttgggattttttcagaaatcattcccgtttttgcgaggaaacgtctgttcggttattcgtctatggtctttgcgatcgtgctgatcggctttctcgggttcatggtttgggttcaccacatgtttacgacgggactcggaccgatcgctaatgcgatatttgcggttgcgacgatggcgatcgcggtgcctacgggcattaaaattttcaactggcttttgaccatctggggaggtaacgtcaaattcacgacgcctatgctgtatgccgtcgcctttattccttctttcgtactcgggggagtcacgggtgtcatgctggcggccgcagcggcagattatcagttccatgatacgtattttgtcgtagcgcatttccactacgtcattatcggcggcgttgtgttcggcatcctggcgggcgtgcatttctggtggccgaaaatgttcgggaaggtgcttcatgaaacgatggggaaaatttcgttcgtcttattttttatcgggtttcatcttaccttctttattcagcatttcctcggtttgatgggaatgccgcggcgcgtttacacatatctgcccggccaggggcttgataccggcaacctgatcagttcaatcggcgcgtttttcatggcgggcgcggctgctttactcgtcgtcaatattatttatacctcaataaaggggaaatacgtcgggaacgacccgtggctggacggtcgtacgcttgaatgggcggtctcttcgccgccgccggaatataattttaaacagcttccgtttgtccggggacttgacccgctgtggattgaaaagcaggccggaaatgaagggatggcgcctgcagagcctgtagaggacattcatatgccgaacggatccatcatgccgtttatcatatctttcgggctgtttgtcgcagcgtttgggtttttataccactccgattattcatgggggcttccggttatcttcatagggctcggcatcacattctttaccatgctgcttcgctctgtggtcgatgattacggctatcatattcacaaagaagatctgccgaatgatgataaaggggtgaaggcataatgcagctgcaggaaaaaatgacggctgaaacctttccggcttctcctgaaaaagcaacgctggaagggaaaaataagtttttgggattttggctgtttctcggcggggaaacggttctgttcgcctcgctatttgcaacattccttgctttgcgggaatctaaagccggagggccgtcaacggctgagatgtttgagctgccgatcgtatttatcgcgacgatgcttcttttaacgagcagcttaacgagtgtgtatgcgatgtatcatatgaagaatttctcctttaaaaaaatgcaggtgtggcttttggttaccgttttattgggagcaggatttttaggggtggaaatctatgaatttatgcattacactcacgaattcggctttaccattacaagctctgcgctcggctcagcgttttacacgctcgtcggcacacacggagcacacgtggcgttcgggctgttgtggatcagcgcgctgatgatccggaatgcgaaaagagggctcagcctttataatgcgccgaaatattatgtggccagcttatattggcattttatcgatgtcgtgtgggtctttatctttaccgttgtatatttgatggggatggtgggataacgatggacgataacaaaaacagagggactgtcagtacggatctcgaatatcggaaaaagaaaaatgccgaggagatgaaatatcaggtcatatccttcggtttgatgatcggccttacgcttgtcgcgtttttgacggtggctgctgacggcattgccggatggtttacgatgccgtttctgatcctgcttgcggtcatccaggtcatctttcagctgttctactttatgcatatgagccagaaggggcatgaagcgccgtcattatttctgtattcgggaatatttgtcgcgtttatcaccgtgcttgcatttgtcacgattatttggtggtaatcgggacggcggggagtgagagatttgattaatttggaaatgttcgggtttcgcgcaatgtggagcccgtatctgttttgtataactgccgtgataacaggtgtttacttttactggtgcagccggcataaaggacgtgtggccgctaaggagaaggtgctgtttgtgctttccgcgctatttttttacacggctgcgggaagtccggttgatttattgggccatgtgatgttcagtgctcatatggcgcagatggcggttctgtttttagtggtaccgccgctgttgatttccggaattcccggctgggcatggaaaaaactgatcttccgtcctgtcgtaaagccgctgttttcgttcttttcaatgccgcttatcgcattagtgctgtttaacggtattttttcactgtatcacatcccgtttatatttgatttcgtcaaaacggattcgctgtatcacacgctgatgaacggactcatctttgtaacggcgttttttatgtggtggccgcttgtgcataaggtggacggtctgccccgtctcagcggtttaatgaagctggggtatattatggcagacgggattctgttaacgcccgcctgcgcgctcattatgttcagcggggcgcccatgtatgccacgtatacagatccggcggcttgggccgaagcaatgaagctttgcgttcctttagatttgctggaggagatccctttatccggaccggagatgttcaacacgctgcctcctctggaagatcagcagcttggggcagtactgatgaaaatcattcaagaggcggtctacggaacatatttggctgtcatcttttttcagtgggtcagaacggaacgggaaaaagatacgccgtcagagccgccgtatatcgagcataccgtctcatgaaaaaaagtacagcagaatatgctgtacttttttattacatttgcactgtttttaatgactcttccaattcaagcagtaaagctttgctttcagcgacgacatgttccggaaattcttcagcgctgccgtattctacgccgtgcggataataatgctttcctaaaagaggggccttcagctgaatcacggcccggctgccgccgacatcgccctcttttgccgttccttgaatccgcagataaaatgtcccctcaggtactgaaaactttttgtcgtaagtcactctttcataatcccattgtccagccagaatgagccctttaccttccatcagatcattcaagcggctgagctccgctgttaccccttcaagaccgctgttttcaaacttcaaaccttccccctccttttaaaaatgccctttcctgacaatcatagtatgaaagcgttacactttcaatgattcatacggtgaaagtatgcaaaaagaaaaatttgacgacaatagtagcagaaaaaaggaggaattccgcaatgacaaagatcaataagctcatgacgtcagacttgcaatattgtacagtattagataatgtatatgaagctgcggtgaagatgaaagacgcggatgtcggcgccattccgatagtggatgaagacggcgccacccttgtcgggatcgtgacagacagagatctcgtattacggggaattgcttcaaaaaagccgaactctcaaaaaataaccgacgcaatgacagagcgggttatcagtgcagaagaagacgcctctgtggaggaggtgctccatttgatggctgaacatcagctcagaagaattcccgtcacaaaggataaaaaactggtcggcattgttacgctcggcgatctttcgttggccgagcaatcaaatgagcaagcaggccgggcgctgtctgacatttctgaagacggcggtccggaggggtttatccattaaacataaatcacggacgatgcaaataggctgtactgtataagagtaaacaaaaacagaacggtttgaacatatgggggtgagaggttgaaaaatatcgcaagggctctcgttatccttttgcttatttacggagcgtatgttctgtttatacaatatggatcggctcctcagaaaaagacggatcaggaggagcctcaggtttccaatgatgaagagagcggaaaacggctgaaaatgccgtcatccggactgctttctctcatggggaaatctgccgccgatgtgaaaaagaaacttggggaaccgtcccggaaagatccttctgcctacgattacgagtggtgggtgtacaaccaggggaaagaccaatacgtacaagtcggtattttgaatgataaagccgtgactttatacgcttcgggaagcggcatcaacgcaaaaccgtttaagatcggcgaatcaacgggcgaagtttttaaaacgacgcaggtttctccttttgtcaatgtgactgacaagggaaacacgtatcggttcgagttttctgaagaagatatcaatacccgtcccaccgtcaagataggcggaatgtatgttcagctgtacatggacaaatttgacgggaatctgtcaagcatcagggcatttgatgcggaaacacttgtgaaacaaaggccgtatgaagtcatgtacagaggaaagctgacagaacccgagccagtttctgataaaaaatggaacgacattgaacgagcgagtgagcagcagattctcgatattacaaatgtcatccgcgtgaaacacggacttgcaaggctgaaatgggacgaaggcgccgcaaaagtggcattcggccacagcaaggacatgaaggataacaagtatttctctcacgtctcaaaaaaatacgggactctgaaggatcgcttggaaaaaggcgatgtgaaataccgggaggccggtgaaaatattgcctacaactatgtggacggtcctgcagccgtggagggctggctgaacagcgaaggccacagaaaggcgctgttaagcccggattatacgcacctcggtgtcggcgtggaccggaagtattatacgcaaaacttcattaagccttggcagtaaaaaaccgcagaggggcgcgtcccccgcggtttttttatgttttttcgcgagcggcgctcctgctgaaaaaaatatacctgctttttttcgcaatttaggcgaacattaaggcgcatgaaccgatacattatagcaggcaaaacttttcggagggggtgagaattgtggcgaatcagcaatcacggcaatcaatcgatgattttaaacaattcgtaaaaaagcatcccaaactgatccaaaatgttcgcaaggaacaaagaagctggcaggaagtctatgaaaattgggtgcttctgggcgaggatgatccgatatggaacccttttaaagacgaggccgttcagccttcttccgacgcggaaaccaaacaggaaccagctgaaaaaaacgatttcgtttcaaaaatggtcactgccgtcaaaaaaatggatatcaaccaaatgaatgagcagatcaataaaatgagccaatccatttcatcattgcaaagccttttaagccaattttcggggagcagcacgaagcagccccggcaaggctccggacaacatcctttttcgttcaggaaggattaaagaaggggatcgtgtatgcgaaaagaggttcaggaattcatatccgcagatgaggaacggaaacggtttatacggcagcgtcccgtctggtaccgcagacttgcgagaaaaccggacgatctcaattcctttcagcttgacatgatgaatttttatgaaaagacgataccgcatcgggtaagccaattctcaaacgggattcaaatggcgcagatgatgatgcagatggttcacgccatgcgttcacaggattaaaaagcgtttaaacgccgcattttccaattgggtggtttcatggtaaactagcaactggaggtgcgtatttatgtatgcaacaattgagtccgtcaagcttcaaagggaagcggagcagcttgccggcatgattctgcagtctgagacggctgaaaattaccgcgattgttacaagcgtctccgtgaagatgaagaggcagggcggatcattcgttcttttatgagcgttaaagagcagtatgaggatgtgcagcgctttggcaaataccatcctgattatagagagatttcccgcaaaatgagagaaatgaagcgggaactggatttaaacgataaggtggccgaatttaaaaaagcggagactgagcttcagtcgctgcttgacgagatcagcattgaactcggaacggccgtctcggagcatgtaaaagtgccgacggggaatccttattttgacggcctgtcatcctgcggcggcggctgcggttccggcggcggctgcggatgcaaagtttcctgacgagacggccgtctcgtcttttacataaaatgaacagaaagtcaggcgggtgatcatgatggaaaataagcgccaaggcataatcgtatatctgcattccttaaaacacagcaaaatgctgagaaaattcggcaacgttcattatgtttcaaagcggctgaaatacgttgtgctgtattgcgatatggacctaatcgaaaaaacaatggaaaagatttcttcttattcttatgtgaagaaggtagagccttcttataaaccttttttaaagctggaatttgaatcaaagcttgataaagcgaaagagtacgattataaaatcggcatataaaaaaatccccgcagatacctgcggggtccttctattccttaacaagttaaggagaaggaaaagggagaggagaaaccggaggaagaacttatggggaaacgtaagtcttctccgcggttggcaacaacatcattcattgatgctgttacacgtagtcttgacaggaatgtgaatatgtatacacgatttcacgttcattgtttgaaagaatgctttatgataagatagggattgtttttatacataacggctcagccgatgagaaacatcaaagttttcagaaaaagtggtgtgaataatgagagtaatttccggttcaagaaaaggacgagccttaaaggctgtgccgggcacatcaacaaggccgacgacggataaagtaaaagagtctatttttaatatgatcggcccgtattttgacggaggaacggggctggatttatttgcggggagcggcggtctcgggattgaagcgctgtcgcgcggatttgaccgctgtatctttgtggatcgtgatttcaaagccatccaaacggtaaaagcgaatatcaaagcgcttgatctgctgtcttcagcggaagtataccgcaatgatgcagagcgggccctctatgccgcggcgaaacgggaaaaaggttttgacggaattttcttagatcctccgtataaggaacaaaagctgaaagcgcttatcgaaatgattgatgagcagaacatgctgaatgaagacggttttgtcgtagccgagcatgataaagccgttgcgcttcctgaagccgtcggcgcgctttctgtaacaagaagggaaatttacgggcttacaggagtgacgatataccgaaatagggggtaatgatgtggcaagtatagctgtatgtcccggaagttttgatcccgttacctacggacatctggacattatcagacggggggcaaacgtgtttgagcaggtgtacgtatgcgtgctcaataattcttctaagcagccgctgtttacagttgaggaacgatgtgagctgttaagagaagtgacaaaagacataccgaatgttacggtcgagacgtcacagggactgttaatcgactatgcgaaaaaaaagcgggcgaaggcgattatcagggggctcagagccgtttctgacttcgaatatgagatgcaggggacttccgtcaaccgcgtgctcgacgaatcaatagaaactttttttatgatgacgaacaatcagtactcttttttaagttcaagcatcgtaaaagaagtcgcaaaatataacgggcctgtttcagagtttgttcctccggaagttgaacaggcgctgaagcagaaatttaaaggatgagaagcgctgattggcgtctcatcctttttttgtccgtgctgacagcctgtaacaataaatcaatgcgtatacggcgagagctgtcagcgtgatagcgggcccggtttcaacaagcgtattccaaccgctgacggcagcagataccgcttcatgatcgcggaaagggaggaatacggactggtaaggttcgtccaacgcatggtaaagcggcttccacagtaagagaataaagagtgcggcataaatgccctgaaggatacgcgccgcgaaaaacggtttaaagcggatatctgtttccgataaaatgccggctacctgggcctgtacggaaaggccgctgaacccgagaataaaactcacaatcatggctttcggcagcaaggcggcatcagcttcactgaccagcttgctcccaagtgtaatttcaaacatcccgctgataagagggatgtccagatttgccggaagatgaaaaagcgaaagcagcgcgtttgtaaatacagaaagcacatccatgacttgtacgattgataataaccggctgaaaaccgaaaacaatataataaaaccgcccaccatcagcaaggtttgtacagaagaggtgacggcgtcgcccaaaatttttccgagcggccgcttttccgaaagccgcgccttgtggagggccagaaatgcttccttcagagaagggagagcgatcgtctttttaccggtatacgccgcttcttctttccgtccgtatgaacgcatcgtcaggccgacagcgatgtttccgagatagtgagccgatgccagcagaatgccgagagacgcgttatgaaaaaagccgactgccacagcagcgaatataaataacggattggatgaattggtaaaagagacgaggcgttcagcctctactctggagatttgtttatcctggcgcagccgtgcagtcagcttcgcgccggccggattgcctgaagccatgcccatagccagtacaaatccgccgacccccggcactctgaaaatgggacgcataaagggttcgagtaaaaggccgacaaacttgacaatgccgaatccgattaaaagctcagatagaataaaaaacggaagcaatgaaggaaaaactacctcccaccacatggaaagaccggttttggaggcttcgaatgaggcctgagggtgtgaaataaccgtcgccgtcaaaaaaatgaaaaacaatgaaatcaaaaatgtatgaaacttagacaaattcattcttacctccccgatgctaaaattgcacactgacatttatatcatgataaaatatagaacagaccttaaaggcggcccggcaagtacctatttgtcatcctgtactaatatacgagcataggggttcaatttagaccatagaattcatgtataggatgtatattagggggttcgtcgcgttggccaaacctacaatcgggttagcgttaggttcgggaggggcaagaggcatcgctcatctcggagtgttatccagtttacataagcatcagattccaattgatatgattgccggcagcagcatgggagcattagtcggaagcttttatgcggccgggcatgacgtggccacgatgaaaaaagtcgccaaagcatttaagcggcggctgtacgcggattatacgatgccgaggctcggatttttaaaaggggaccgcatcaggcagctcgttcatgcctatacgtacggcaagccgatagaagaactgcggatcccgctcggcatcgtggcctgcgaccttcagaccggcgaaaagcttgtttttacgaaaggttcagtatccgaagccgtccgcgcgagcatcagcataccgggcgttttcgtcccgcaaaaaatgaacggacgtatgttagtcgacggcgcggtggtcgacagaatcccggtttccgccgtaaaagatatgggtgctgatatcgtcatcgcctctgacgtatcccgggtgaaaaaaacggaaaaggcggcacatatttttgatgtaatcatgcaaagtatggatatactgcaaaatgaattggtccgtcaccagaccattgccgcagacgtcatgatccgcccttctcttgaatcattcagctcaagttcttttgccaacattgatcatatgatcacagcgggcgaagaagccgcagaccggatgatcggccggattaaacaagaaatagagaactgggagggctaactcatatgaaagcaaaacattttcgctgggtgtttatcatcctgatcttattaatcgctgttacatttattaagcttccgtattacatcacacagccgggagaagcatcagagctgagaccgctgattaaggtggacggaggttatcctgaaaaaggaagcctttccttgatgactgtcaaagtaggccccgccaatccgtatacatatctttgggcgaaagtgcatccttacgatgaaatcgtctctgatgaaagcataaaagaagagggcgaatcggactcggattatatgaagcgccagctgcaaatgatgaaaagctcccaagaaaacgcggtcattgccgcttatcaaaaagccgggaaacaggtgaaatactcatttaacggcatttatgccagttcagtcgtctctgacatgccggcaaaaggaaaaatagaggtcggtgataaaatcatcagcgcggacgggaaaacatacgaatccgctgaaaagctgattgattatatcagcagcaaaaaagcgggggaaaaagtaacgtttcacattgaacgggacacgaaagaaaagaccgttgacattgtgctgaaatcattcccggacgacccgaaaagagcgggaatcggcgtcgcattatatacggaccggaacgtgaaagtgaagccggatcttcatttcagcattgaaaacatcggcgggccttctgcgggtctcatgatgtctttagaaatttacaaccagctgacaaaacctgacgaaacaaaaggctataatatagccggaacggggacaatcgacgtggacggcaaagtcggaccgatcggcggaatcgatcagaaagtcgtcgccgcagacaaagcgggaaaagatattttctttgcgccgaatcaaaacggagctgaaaattctgattacaaaaatgcggtaaaaacggcgaaagcaatcaagtccgatatgaagatcgtccctgtcgacaccatgcaggacgcacttgactatttggatcagctgaaagtaaaaagcacctgatacagacaggtgctttttttacgcattcaaaaaacgattttcatcttcatcatagcggatcggcgcttgtgaaaattcctgtttctcaaacaatgtgcgttcaggttcgtttatcggcaggctgtaaacccgtcccgccagtatgtccagatccagagcgggatgagagaaagaagagagcttgctgacgagaggtgcggtaagctcttttttctttgccgacaggtacgcctgtccttttttcgtcattccgagaagacggatataaggagcgcttgaaggctgtaagagccgatgcatgtcttcctttttcgtccgtgtcagaatgtgcgtattcatccgctgcagcctcgtccacgtgtatcgttttgttttcaatcgttccatcatttcgcgataggatcgggcttgtctgatggtgcgcagaatcctgtgctcaaggccttcttccacttcatagattcggctcaattcttcagcggaaagagtgctgaggctgtattttacatatgaaaaatagtcttccgtgctgtgccatattccgtatgaatttctgtatgcctccagctcacgcgcagacgcttccgggagaaagctccttgcggccgccgttcctttttctatcagcgctttccggatgcttgttgcgctggctatccggctgttatctgcggggagctcggcgtcatgatactgggaagcgattctggctgtcgtataaggcttcatagcggaaccggaggtgtgtatcgctctaacgtagtgaaaaccgagaatattgttcggcttggacaaatcgagcatgtcccgccctttgaatatgtgtgaaaaagcttttgaggcggcggccggatagctgagaccctttttcagctcctctttcagaatcaggctgcagtcatcttcctttcggctgaacgcttcagacgcttcaataaaaggttcgatccgcccgttttcgctgccgaaaaacaagctgctgcatcctaaatgatgaagaagcgaaacgctgccgcgcgcgaataattccgctttttgtacggcatatatataagggagctcaatgacgatatccacgccgttttccagcgccatttttgtccgggcccactttgagacggcggccggttccccgcgctgcaaaaaagggccgctcatcaccgccgccgcgacgctgctgtccgttttgatttttgcttgttccgcatgatagcggtgtccgttatgaaagggattatattcaacaaccaggccgactgctttcatatttgtcccgcctttcttgctatgttttgcttcgtgtggtacatttgcaaatgaagtgcatattttagtccgtttcgtttagtgtatgcatagcctatccggctgtcaacgattgcatgacggcggcattatgctgtaaagaaaaaatattgacaaaaacattctgaaaagctataatcatgtttgttgctttcctgaggtgatacaaatgaaatggacgatttatcagcttcatcaaatggcaaaaaagagctttgaatttgatgaaacagttgagttaaatgagctgacaaaattgaattctgacatccgccgcatttctcctgtccgggtgaagggccgcgcggagattgaatccaagcaagtttcgtttgactttacgatttcaggcgaaatggttttgccgtgctcaagaactttagttgatgtgccgtatccatttacaatcgcgacaaaagaactgtttagatttcataagtcggatgatatagaagatgaggacgttcatattgctgaagacgatatcgtcgacttaactccgatcataaaagaagagattcttttagaaattcctatgcaagtcttttgtgaaactgaacaaaaagaaggagccgctccccaagtggggaaggattggcaagtgatttctgaggaagacaagaaaaatcaaatcgaccccagacttgcggatctgaaaaagctcttaacacaagatgatgaatcttaactctttaaggaggtgggaataatggctgtaccttttagaagaacttctaaaatgaaaaaaagattgcgccgtacacatttcaaactaaatgtacctggtatgacagaatgcccgtcatgcggagagatgaaattgtctcaccgtgtatgtaaagcatgcggatcatacaacggcaaagacataaatgttaaaagcaattaatgtatgaagaaaagcgcgggaatctcggttcctgcgcttttctttttttctccctccggcctgcttccgccgaaaaaattgtgagcgccaatagtctatctaatctatcagcggcatatgtatgaggtaaatgagcaaatatggagggagatacgattgacgataacgagacaagacgcgtggacgcaagatgaagatttgctgctggccgaagtggtgctcaggcatattcgggaaggcgggacccagctttccgcttttgaagaagtcggcagagcgctgacgagaacggctgccgcctgcgggttcagatggaattcttatgtcagaaaacaatatcagtcagggatagaactggcgaaaaaacagcggaaggaattaagaaagcagatcggggtgcattccgccaatctgccgggaaccgtcaaacagcctccgatccgcagggcggaaggagaaaaagagctgtccattgatgatgtcattttgtttctgcagcaatttaaagagtcgccggccacagcggatgtgcgtcatgaaaaagaaaaactcacagaacagctgaccgcgctgcaaaaagaagtcgaggatctgcgtgaggaaaatgaaagcttgagaaacaagctggagatgacggaagaagattataaagcgttaattgacattatggacagagcgagaaggatggtcaattcaaaagaagacgacagaaaatcggcgcagagcctgtaaaatgaaccggcctgggggcggcgcccggccggttttttattatgccgtttctccggatgtcatttcaccgtccatatcgggatgccagatataaggattttctcctttatcacgcgccatatcatatttaacgggctcaaaattcatcttatcccagaaatctgctgatttcatgcgtgaatttgtcctgatcggcattctgaaggattttgcaaaatcaacaagcgcttttccgtatccgttgttttgatagcccggaagaacctcaagcttccaaagttccaaaaagtcctgacgctgatcaaaatacggattcgcacctccgtttacctgatataaactcattctcgccactagtttatccccgaagtaaatcccgtaaaaaggcgaggtgctgtcattttcaatgatgttatcctgaagatcttcaagcatcgacagctcctgcatcccgtattccttaaaccttttaaattcttcgagtgtcttaaagttgatgagcagtcgctctattttcaacacaaactccccctttgttgtgttctaccattattgtaaacgctttaattgaaaattccaactataatatgcttgccagtctttttgctcaaaacgaaattgaagtaatttgcgtcggcttctgctatgataatatggaaaaatgcagatatagggtgtgacagtgtgaaaatcggaattatcggcggcggagcggtaggccttttatgtgcttactacttatcgtcccgccatcaggtaacggtcattacgcggcggacggagcaggctgatgcgattaactcaggcggtatacggcttttgaaagacggaatagaatgtacggcggcatgcagagcgcaaacaggcatcacttccggattcgacctcttaatcgcagccgttaaacagcaccagctaagtgcggtgttgcgggatcttgagatgataaaagggacgaatgtgctgtttttgcaaaacggcatgggacacatacacgacattaaagattggcatacggatcattcgctttatgccggcactgttgagcacggagcaaaaaagatttcagatcatgccgttgaacatacgggatcgggggccgtaagatggagtgtattcagcgcttcccggccggaaacgctcaaaagcatcttttccggcatgcaccgggattttcccgtatatgatgaaaacgactggtatcggctgttaacgggaaaactgatcgtaaatgtatgcattaacccgttaactgcattgctgcgcgtgaaaaacggagagctggtaacaaatgacgcttacaaaaaatatatgagaaacgtgtttgaagaagcggagacaatacttggcctcgccgatagagaagaagcgtggaacaaggtttgcgaagtttgcagactgacggaaaaaaatcattcttccatgctcgtcgatatcatggcaggcaggcggacagaggccgatgcgattatcggctaccttgtaaaagaagcggaaagccgcggattgccggccgttcatctcacgtttttacaccgcagcataaaagcgttagaaagaaactgaaacaaagtcttttgaggttttccggtaacatgctatactcatttcggaaacctaactatttattggagaaaggaagttccagacagatgcagctaactgaactttccatcaaaagtcaaaataagtttgtgcagcactatatagatggagaaaacatgtcttcattttttgattatgatattcattcagaggacgtatggcaaaagcggcttcatgacttgtcttcgcggccgtttgccagagaggaattagcggattatttatcctcctatcacgaaaaatttcactccgccgccatgcaggcctccatcgaaaaactgagagatccaaaaagcgcagcggttgtaggcggccagcaggccggtcttttaacggggcctctttacaccatacataaaattatctccattatcgtacttgccagacagcaggaagaggtgttacagattcctgtcgttccgattttctgggtggcgggtgaagatcacgatctggaagaaatcaattttgtgcatacgtcagcagagaataaaggtccggtgaaacagaaactgccgcagtcgtactggaaaaaaacatcagcggctaaaaccgagcttgatcaggaaaaatgcgcggcttggattgatgaagtgttcgttgcttttgaggaaacggatcacacaaacacactccttcaaaacgtgaagcgatgtttacgctcatcagagacattcacggacttttttgagctgttgatcgccgacttgtttcaagaagaaggccttattctgatgaattcgggagatccggggattaaaaagctggaaacgggtatgtttcagcagattttaaaacacaatcatgagcttgccaaagccgtgtcagaccagcagagtcttatgcgggaagccggttatcacccgattattgaatcggacaaagatcaggccaatctgttttacgaacacgagggagagcgtttcttaattgaaaaagacaacggcgtttttgtcattaaggagcttgacctgaagtggacgaacgacgagcttcatacccatatggaagaaaaaccggaatgtttcagcaataacgttgtgacaaggccgcttatgcaggagtttctcattccgactctggcgtttatcgcggggccgggggagatcaattattggggtgagctgaagcaggctttctcattaatgggccttcgcatgacgccggtagtgccgagactgaacattacgattcttgagcgccatattgaaaagaagctttcagaacggaatatcccgcttcaggaagcgatcgaacacggcaccggacacctgaaagacacttattttgaagagcagattccggaagagttttcttctgtaatggaacaggcgaagtcgcagattgaagctgtccataaacgcgcaagggacgaagcgctgaaggtcgattcaagccttgagccgctcttacagaagaatgccgccttcattcaagatcagctcttgtttttagaacggacggtaacgaaaagaattgaagaaaaagaaggctttgtgctgcgtgactatgaaagaatccaaaacagcgtcagaccgctcggcgctccgcaggaacggatttggaatgtgatgtattatctgaaccgctacggtccaaaattcttcacaaccttcaaacatctgccattttcttttcaaaaccaacatcagattgtcaaactttgaaataaagttttaaagaaccctgaatagttcagggtttttttttatgtgtaaacagtgtaaaatgaggttgtggagagaagtggcggatagtggtgagtttaggggagaaagtgggggtccttatcatgtttatgggtgaataccggcatactgttgatgcaaagggccgcatgatcgtacccgcaaaattcagagatggcctcggtgagcagttcgtgctgaccagaggactggaccaatgccttttcggctatccgatgaatgaatggaagctgattgaagaaaagctgaaggctctgccgctcaccaaaaaagacgcccgcgcatttacccgattctttttttccggtgcgaccgaatgcgaactggacaagcagggaagggttaatattgcgtcatctcttctgaattacgcaaaactggaaaaagaatgtgttgtcatcggggtttccaatcgaattgaattgtggagtaaggtaatatgggaacaatacacagaagagcaagaagattcattcgctgaaattgctgaaaacatgattggatttgatatataatggatcttcgtgcatcacaacaacaactgacaattcaattcattccttataaaggtgggaccgacacaaatgtttcagcataagacagtacttcttcgtgaaaccgtcgacggtttaaatatcaaaccggacggaacctatgtggactgcacccttggcggcgccgggcacagtacatatttattgcagcaattatcggaaaaaggacgcttgatcgcctttgaccaagatgacacagcacttgaaaacgcaaagaaaacattgtccgaatacaaaggacagcttattctggtgaaaagcaactttcgttatttaaaagagtgtttacatgaacacggcattacgagtgtcgacggaattttatttgatttaggagtatcctctccgcagcttgatacaccggaacggggattcagctatcatcatgacgcaccgctggacatgaggatggaccagtcggccgcccttacggcgaaagaagtcgtaaatgaatggcggtatgaggaccttgtgaggattttctttagatacggagaagaaaaattcagcaagcagatcgcccgaaaaattgaagaggctagagaaaaatcgcctattcaaacaaccggccaactggtcgatctaataaaggacgcgataccggctccggcgagaagaagcggaggtcatccggccaaacgtgtattccaagccattcgaatcgccgtaaacgacgagcttcaagtatttgaagaggccctcttgcaagcgatagaggtgctgaagccgggcggaagggtgtctgtgatcacttttcactcgctggaagacagaatgtgcaagacgacattcaaggaaaaatcatcacttcccgaactgcctccgggtcttcccgtgataccggaagaatttgaaccggaattaaaactgattacgagaaagcccattacggcatcaaaagaggagcttgaagaaaataaccgcgcccggtcagcgaagctccgcattgcggagaaacgaaaataacgggcagcaaatgacaacattaaaggaggtcatcagcctatgagcaacttagcttaccagcaggaaaaacaacaacggccagtgataagtcccgaaaaaaaggtgattgtcaaaaagagggcttccattacactcggggaaaaggtgctgctcgtcctgtttgccattgccgttctctccacatcaatgtttatcgtatcaaaggcatacgcggcgtaccaatccaatattgaggtgcaaaaactggaggagaaagtatctgagaagaataagcagatcggtgatctcgaaaagacggctgctgacttaagccagccgcagcgcctgatggatatcgctaaaaagcacggtttgaatctgaaagataaaaaagtgaaaaacatacaggaatgataacccatgccgaaaaaaaataagtttatgaacagaggagcagcgatactcagtatttgtttcgctctctttttctttgtcattctcgggagaatggcgtacattcaattaaccggtaaagcaaacggtgtagaacttgcaacaaaagcgactgagcagcacgaaaaaaagcggacgatagaagcgagccgcggctctattcttgaccggaacggcaaagtgcttgcagaggacacggcgacatataagctcattgccgtgcttgataaaaaaatgacgagtgatccgaagcatcctcagcatgtcaaagacaaagagaaaacggcggaaaaactggcgaccgttatcaatcttgataaaagcgagattctggacatcttaaacagggatggcgcgaagcaggtggaattcggttcagccggccgcgatatctcttatgcgaaaaaacaaaagatcgaaaaaatgaatcttccgggtatttctttcttaagagatacgaagcgctactatccgaacggtgtatttttgtcaaatgttctcggctatgccgatgtgaatgaaaaaacaaacgagatacaaggctctttagggcttgaaaaaatactgaataactatctgacggaacgcgacggatccgtcacttacgaaagtgataaatccggctggaaacttccgaacagcaaagaaaaaatcaccgcacctaaaaacggtgacaatgtatatttaaccattgatcagaaaattcaaacctttttagaagacagcatgacgaaagtagcggaaaaatataaaccgaaaaaaattatggcggctgtcgtagaaccgaaaacaggcaaggtgcttgcgatggggcagcgtccgagtttcgacccgaatatcagaaacgtcaccaattattacaacgacttagtgtcgtacgcgtatgaaccgggatcgacgatgaagatctttacgcttgccgcggcgattcaggaaaatgtgttttccgcaaacgagaaatataaatcaggaacatataaagtgggaggcaaacctgttaaagattggaacgacggcgccggatggggtatgacaagcttccgtgacggcctcatgaggtcatccaatgttgctttcgccaaactggccaacgaaaaactggggtttgaccggtttaatgagtacctgcacaaattcgggctctatcaaaaaacagggattgatctgcccggtgaagtatcaagtaaaattaactacaaatatgattttgacaaagcgtctacggcttacggccaagcatcggcgataacgccgatccagcagctgcaggcggtcacggcgattgccaataacggcaaaatgatgaaaccttacgtcattgatcatattgtcgaccccgatacgaaaaaagtcgtcaagcagacaaaaccagagcaagcaggcacgccgatttcagccgatacggcgaaaaaagtccggaatctgctcggagaagtcgtgacgtcagacatcggaacgggaaaaccttataaaattgaaggatttgacgtcgcgggtaaaacgggaaccgcacaaattgccgggacgggcggatatttaaggggaacgagcaactatgtgttttcattcatgggcatggcgccgaaaaatgatcctaagctcgtcatctatgtagccgtgcagcagccgcaattaaaagcgggtcaaagcagctctgatcctgtcgcggaaatctttaacccgacgatgaaaaacagcctccactacatgaatatcgaaccgacggaaaaaacagattccggtcaggaagaaacgaaaagccaaaaaatgcctgacctgacagataagacggtcaagagcgctgagaaggaagcgaaaaatgaacatctcacaccgattgtcatcggcagcgatgttgccgtaaaagagcagtatccgacagccggagaagatgtgatcaccaatcagaaaatcttcttaaaaacagacggaaagatgacgatgccggatatgtccggatggtcgagacgggaagtgcttcaattcagcaaagtatcaggcattcacattgatgtgagcggtgaaggttacgcttcaagccaaagtgtgaaaaaaggcaaagaactgaaagaaaataccgtgatcaaggtgaaatttaaaaatcctgattaacgggacagagaagtccgcggatgcccgcgggcttcttttttatgcgccgccgttctatgtgtccaagctgaggcataaattgaaacaagcctaaataaggagtggacggtcccttgcgcgtttcaaatgtaacggttcgaaaacgtttattactggttttgctttttggcgtaatcatttttttgatcattgacagcagattaggctatgtccaatttgtgatgggagaaaagctgacttcactggctaaggattcctggagccggaatttgccgtttgagcctgagcggggagagatccttgaccgaaacggcgtgaagctggctactaataaaagcgcgccgaccgtctttgtcgtaccgcgccagatccaaaatcccataaaaacgggcaagcttctcgcgtcagttttaaatatgtcggaagagaaggtctacaaacacattactaagaaaacctccatagaaaaaatctcacccgaggggcggaaaatttccaataaaaaagcgaaagaaatcaaagcgctcgacttaaaaggggtttatgtggctgaagacagcatccgccattatccgtacggaagctttttgtcccatgttctcggttttgccggtattgataaccagggccttctcggattggaggcttattatgatgatgacttaaaaggtgtaaagggatctgtgaaattttatacggatgccaaggggaagaaaatgcctgatgaagcggatgattacacccctccgaaagacggacttgatatgaaattgacgattgacgccaaggttcagacgattatagaaagggagctcgacaatgcagcggcgaaatataacccggacggaatgattgcggtcgcaatgaatccgaaaaacggggaagtgctcggcatgtcaagccgtcctgattttgatccggctgactatcaatcggtggatccgtccgtttacaaccgaaacctgccggtatggagcacatatgaaccgggttcgacctttaagattattacgcttgcggcggcgctccaagagcaaaaagtaaacttgcaaagagaccacttttatgacaaaggatttgccgaggttgacggcgcccgcctccgatgctggaaaaagggcggccacggttcgcaatcttatcttgaagtcgttcaaaattcctgcaaccctgggtttgtacagctgggggaacggctcggaaaacaaaagctgtttcaatatattaaggacttcggctttggaaagaaaacaggcattgatctgcaaggggaaggaacggggatcttattcccgcttgacagagtcggaccggtcgaacaggcgacaaccgctttcggacaaggggtttccgtcacgccgattcagcaggtggcagccgtttccgcagcaataaacggcggaacgctttatactccgtttatcgccaaagagtgggttgatcccgttacgaaaaaaactgttaagaaacaatcaccgattgcgaaaaggcaagttatttcccaggaaacgtcaaagcagatcagatatgctttagaaagcgtcgtcgctcagggaacggggcggaacgcctttgtggaagggtatcgcgtcggcggaaaaacaggtaccgcacaaaaggtcaaagacggcaaatatctcgaaaacaaccatatcgtctcctttatcggttttgcgccggctgatgacccgagccttgtcgtgtatgtcgcggttgataatccgaaaggcacgattcaattcgggggaaccgtcgccgcgccgattgtcggaaatatgatgagagacagtctgcctgagctcggcgtgaaaccgcgaaaaaatcaaatcgagaaaaaatatcaatggaacgacacaaaaacaatagaggttccgaatgttgtagggatgtctgtctctgatcttgagtcgctgcttgtcaatttgaatattgactcctcaggaaaaggaagcaaaattgtgaaacaatcacctgcagccggaacgaaagtaaaagaaggctcaaagatccgtgtttacttgagtgaagaatgagtctttttgaggcagccgattgttttcggctgcctcttatcgtaaagagaaaaaaagaagataacttttaagattaactggatgtatccttttatttacgctaaaatatgaactgtatgtttaaaagccattctgacttttataaacggttatcatgataaaagaatgaatagaatttctgagaggtttgatacaatgaaacttacaaagctgcttacatatttaatggccgaacctgttcaaaatgactttcatgaccctgacataacttcaattgagatggactccagggaagtgagaaaagggagtctttttgtgtgtataaaagggtatacggtagacggacatgatttcgcccaaaaagccgcagaaaacggcgcggcggccatcgttgccgagaaagagcttgacgtcgatgttcctgtcattatcgtccgccggtcacagcgggcgctcagcgttctttctgacgcgttttacgggcagccgacaaagcagcttcagcttatcggcatcaccggcacaaacggcaaaacatcaacgacgcacatggttgatgagatttttaaaaaagcgggaagacagaccggtttaatcggaacgatgtacattaaaatcggggatgagacattcccggtcaaaaatacaacgcccgaaagcgtcacactgcaaaaaacgttcaagaaaatgaatgatgagcacgttgacacagctattatggaagtgtcttctcacgctctgtcactcggcagggttcacggctgcgattatgatatcgccgtattcacgaacctgacgcaggaccatttagattatcataagacgatggaagactacagacaggctaaaagcctcctgttttcccagctgggcggctcctttaaccatgaaaagccgaagcgggccgttttaaacgcagatgacaaagccagtgcttattttgaaaaagtgacggcggcgcacatccttacatacggaatcgagaatgatgccgatgtcatggcgaaacaaatcgagatctctgcgcaaggcacaagctttgaacttgttacgccaaaaggaacaaagcagatcacggtttcactcgtcggccgcttcaacgtgtataacgtactggctgcagcggcgacagcgatcgcagcgggtctgccgtttgatacgatcacaagcgctcttgaagagctgcaaggtgtcagaggccggtttgaactggtgaatcacaatcagccgtttcctgtggtcgtcgattatgcgcacacgcctgacagtctggaaaacgttctgaatacatgcaaagacatgacagagggcaagcttttcgtcgtcgtcggatgcggcggagaccgggacaaaacgaaacgcccgaaaatggcggaaattgcggtgcggattgccgacgaaccgattttcacttcagataacccgagaagcgaggacccgctggccatattaagagatatggaaagaggggtagaaggcacctactatcacagtatcgcaaaccgcgagcaggctatcttttttgccattgccaacgcgaaaaagggagatgtggttctgattgccgggaaagggcatgaaacctatcagcagatcggcaatgaaacattcgactttgatgacgccgaagtagcgggaagagctattgttgagctgaataaaaagtaaaacaggaaagagtgttagaatgagggaaatgaatagaattacggggacacaatgtgaatatgataaatacgtatgtcgtttgaacgaaacgggaggagaaaagagcaatgcttgagcaagtgattttatttacaataataatgggatttttaatcagtgttctgatatctccgattcttatcccgtttttaagacgtttaaaattcggccaaagtatcagggaagaggggccgaaatcacatatgaaaaaatcagggacgccgacgatgggcggggtcatgattattgtatccatcgccattacggcgattgtcatgacgcagaaattttcgcatctgagcgcggaaatgtttcttctgctgtttgtcacgatcggatacggtctgctcggctttctggatgactatattaaagtagtaatgaaacggaatctcggattgacgtcgaagcagaaattgatcggccagatcattattgccattgtattttacggagtatatcattattgccatttttcaaccggcatcagggtgccgggcacacatctgtcaatcgatctcggctggggatactttatcctcgttctctttatgcttgtcggaggttcaaatgccgtcaatctgacagacggtctggacggtctcttgtccggtaccgcggctatcgcattcggcgctttcgccatccttgcgtggaaccagtcacaatatgacgttgcgattttctcggttgccgttgtcggcgccgttctcggttttcttgtattcaacgcccatcccgccaaggtatttatgggggataccggttcgcttgcgctcggaggagcgatcgtgaccgttgccattttgacgaagcttgaaattctgctcgtcattatcggcggagtatttgttattgagaccttatctgttatcttacaagtcatcagctttaaaacgacaggaaaacgaatctttaagatgagtccgcttcaccaccattacgaattggtcggatggtctgaatggagagttgtcgtcacattctggactgcgggactgctgcttgccgttttaggaatttacatcgaggtgtggttataagtggaaaacgaactttttttgcaaaaacaaaactttctggtcctcggactggcgaaaagcggatatgcggctgcgtcgattcttcatgaaaaaggcattaacgtcgtcgtgaatgatcaaaaagcctttgaagagaacgaacctgcccaaaggcttgcagaaagaggaattgaagtcatctgcggtgagcatccgacgtcactttttgatcagcatcacattaccattctgatcaaaaatcccggaatcccgtatgaaaatatcatggtggaggaagcgcaaagaagaggcatcccggtctggacggaaatcgagcttgcgtattatatcaccaatgcaaaattcatcggcattacaggttcaaacgggaaaacaacaacgacgaccctgatttatgaaatgctgaaagctgattcgataaagacgctgatcgcagggaatatcggcactgtcgccagtgaagtggcttatcatgctgacggtgatgaatggatcgtcacagagctttcttcgttccagcttatggggactcatgcgttcagacctgaaatcggcctgattttaaatgtgttcgacgctcatttggattaccatcacagccgtgaaaactatgaaaaagccaagcagaacgtgtatcttcatcagcttgagagtgatacggccatcgtgaatcaaagcgatgaaacagtcgtgcggcttgccgaaagcggaaaagccggcatcgttccgttttcagttcatcaggaactgtcaagcggcgcattcattaaagacggaatgctgatgttcggcgatgaagcgattctgcctgttgatgacatcgtactgccgggcgcgcacaatctagaaaatatattagccgctgtagccgcagccaaaacggcgggcgcgtctaataaagcgattcagaaggtgctgacaagctttaccggtgtcaaacaccgtctgcagtatgtaacagcgatccagaatcgtaaattttataatgacagcaaagcgacgaatattttggccacaagcaaagcgctctccgcgttcaaagctccggttattctgcttgcaggcggactggaccgcggcaacggttttgacgacctgaaaccgtatatggacaatgtcaaagcggtcctgacgttcggacagacagcgccgaagatagaaaaactgggcaatgagctgggaatacaacatgtcaaacgtgtcgataatgttgaacaagcagtatctgcggcgtttgcgctctcaaatgaaggagacgtcatcctcttgtcacccgcgtgtgcaagctgggatcagttcaaaacatttgaagaacgcggtgacatgtttatagatgccgtgcatatgcttaagtaagggcttgtctctgttcatcggcagccctaaatgacttatgcttggggtgtcgattgctttgactactaaaaaaacagcgcctgatttgttattagttatcattacgttattgcttttaacaataggattaattatggtctacagtgcaagtgcggtatgggcggattataaatttgacgactcgtttttcttcgcgaaacggcagctgctgtttgcggggatcggcgtcattgccatgtttttcattatgaatgtggattattggacatggcgcacatggtcgaagctgcttctgatcatttgtttttttctgcttgtgcttgtgctgattccgggagtcggaatggtgcggaacggttcaagaagctggatcggagtgggagcgttcagcattcagccttcggagtttatgaaactcgcgatgattgcgtttctggctaaatttctttctgaaaaacagaagaatattacgtcattcagacgcggattcgttcccgcgctcggaatcgtgttttctgcatttattattattatgtgccagccggatctgggaacggggacggtaatggtgggcacgtgcatcgtgatgatttttgtttccggtgcgcgaatcgctcattttgcgtttctcggactcatcggtttaagcggatttgcggcactagttctgtccgctccttatcggattaaacggattacctcttacttaaacccgtgggaggatccgcttggaagcggatttcagatcattcagtcgctctatgccgtaggtccgggcggactgttcgggatggggctgggtcaaagccggcaaaagtttttttacctgccggagccgcaaaccgatttcatttttgctattttatctgaggaactcggctttatcggcggttcgctcatattgctgctgttcagtattttattatggcggggcgtcaggattgccctcggcgcgccggatttatacggaagctttgtcgccatcggtattatttctatgatagctattcaagtcatgattaatatcggcgttgtgacggggctgatcccggtaacaggaattacgctgccgtttttaagctacggaggctcatcactgacgctgatgctcgcagcggtcggcgtgcttttaaatgtcagccggtactcgaggtattgatctgtatcttgcctcatcactcatgatttattcgttatctataaaaaaacagacaacatcaataaccctgtcctaaaaaacagggttatcgctatgtgattaagggggacatacgaatgcgtattgcagtaagcggaggcggaaccggaggacatatttatccggccctggcctttattaaagaagttcagcgccggcatccggatgtggaatttttgtatatcggaacagagaacggtcttgagaaaaaaattgttgaacgggaaaatattccgtttcgcgccattgaaattacaggtttcaaacgaaaactttcttttgaaaatgtaaaaaccgtcatgcgtttcttaaaaggcgtgacgaaaagcaaatcatatttaaaagagtttaaaccggatgccgttatcggtacaggcggctatgtatgcggtccggtcgtatacgcggcggcaaagatgggaattccgacgatcattcatgagcaaaacagcctgcccggcatcacaaataagtttctctcgaaatatgttaataaggtggcaatttgctttgaagaggcaaaatcgcattttcctgctgaaaaagttgtgtttacgggaaacccgagagcctctgaagtcgtctctattaagacaggccgctcattaactgagttcgggctgaaagacaatcaaaaaacggtgctcattttcggcggaagcagaggcgcggctcccattaaccgtgccgttatagatatgcaggaagaattgaaaacgagaccttaccaagtcctttatattaccggggaagtgcattacgagaaggtaacggctgagctgaaaggcggaaaagccgctgataatatggtgacaaaaccgtttttgcaccaaatgccggagtacttacaatcaattgatgtcattgtggcaagagccggagcgacgacgattgcggagatcaccgctctcggcattccgagcgtgcttattccgagcccgtatgtaacagccaatcaccaggaagtcaatgcgaaggcgctcagccagcatgatgctgcaatcgtactgaaggaaaccgagctcagcggagaaaaactgatcgctgcgctggacaaaatcgtcatgaatgaagaaaccttaaaagacatgagtgagcggacaaaatcactcggtgttccggatgcggcagccagactgtacagtatcatggaagacataaaaaaatagagcaaatggaatgcggaggtttatgatggagaacgtaattcaggaattaagagaccgcgaagtcggcaaagtgctggaacaagaaccgctcgcgaaccatacaacgatgaaaatcggcggtccggcggacattttaatcatccccaaccgtgtggaagcggtcaaagatattatggaaattgtgaaaaaacatgatctgccatggacggttatcggccgcggttcaaatctgctcgtgcttgatgaaggcataagaggagttgtcatcaaactgggcgcgggtctggatcatttggagattgacggtgatcaggtgacggtcggaggcggctattcggtcgtccggcttgcgacttccatgagtaaaaaaggaatgtccggtctcgaatttgcagcgggcattcccggatcaatcggcggagccgtctatatgaatgccggggcgcacggatctgatatgagtgagattcttgtgaaagcccgtatcttatttgaagacggcacaatcgaatggctgacaaacgaagagatggatttcagctacagaacgtctgttttgcagaaaaaacgtcccggcgtctgtatcgaggcagttcttcagcttgagcaaaaggaacgggaagccattacggcgcaaatgcagcagaacaaagattacagaaaaaatacgcagccgtattcgagcccatgcgccggaagcatattcagaaatccgctgccgaatcatgccggaaacctcgttgaaaaagcgggattaaaaggacatcagatcggcggagcgaaagtgtccgaaatgcacgggaattttatcgtcaatgccggcggagcgactgccaaggacgttcttgacctgattgaatatgtgaaaaagacaatccgtgagcagtatgatgttgacatgcatacagaagttgaaatcatcggagggaatcgttaaaaggttctctgattacatgagctcatgtgatatacttttaacaaatgtcaaacggcatcacagcatgccgtttgtttttcaatcagacgaatgtcaagctgtttcattcttagtgaggtggacaggcagtgaacccaaatcatgaaagagaaaaaatcgtaaatattgaagagcggattccgaaaatcaaagagcagcggaaacaaaaagcaaaccgccggctgatttcattcattgtgctcttttttatgatggtgctgatcatcgtgtacttgcagatgccgatcagcaaagtgtcttctgtcaccgtttccggaaatgaaaacgtgtctgtaaaagagatcaacgcgctttctgatatacataacggacaaaccgagttctggagtctgaacaagaaacaaacagaagaaaagattgagcagaataagctggtgaaaaaggcggaactttcaaaagtatttcctaacaaagtcagcattcacattgaagaatacaagacgatcgcgtatctgcagcgacatgatgtgtattatgaagtgctcgaaaacggcactgtgctgccgaacgaagtcacgccggatgacgcgggcccgattttggttgactggacaaacgcgaaaaagcgggtcaaaatggcggagcagcttgataagctttccggttcgcttaagcagtcgatttctgaaatctattatacaccggtaaaaatggatcaggaccggatcaagctgtatatgaacgacgggtatgtagttaccgcttctattaaaacgtttgccggccggatgaagacctatccttctatcgtttcccagctggacggcgggaaaaaggggattatccacttagaagtcgctacgtattttgaagaatttaacaaaggtaaatccggcaagaaaaaagaaaatgattaatagttctaaagaactaatttaaaggtgattcaaaagaatctattacaatcagcggggcagccgatataaccgatagcggaatcattatgactatgtttgtttttgcccgggatatggctgccggacaagcggaaaattctcaatgcaatgggcgtgtcttctgcagtgagcactgcatttggaattttcctcctgtttcttcttttttcggatgtttctggcaatatctatagcttttctggaggttcatcttagtgtagactaagggaaagcggatatatttgcatctggattgcacagtatgacaccgtgacaagaaatcttacggtaaggtgggccgtctctaaaaaaaataaaaaaaatgcgatataaaagaggatatacatagaatataacgaatagtttcattaaacataaattgtgagaaatcagataagaatttgttgatgctgttgtttttgttacacacttgtaaagccacattcattgtattgttgttccgcaaataatagaatagaatttgatcgaaatgtgaggaggtgccatagaatgaacaacaatgaactttacgtcagtcttgacatcggtacgtccaatacaaaagtgatcgtcggagaaatgacagatgattcccttaacattatcggagtgggaaatgtgccgtctgaagggttgaaaaaaggctcaatcgttgatatagatgaaaccgttcattctataagaaaagcgtttgaccaagctgaaagaatggtaggttttccgctgaaaaaagccattgtcggcgttaatggaaattatattcatattcaagatacgaacggcgttgtcgctgtttccagtgaaaacaaagaaattcacgttgaagacgtccgcagggtaatggaagcggcacaggtcgtgtcagttccgcatgagcagctgatcgttgacgtcgttccgaaacagtttatcgttgacggaagagacgaaattaccgatccgaaaaaaatgctcggcgtgcgcttggaagtagaaggcacgctgattaccggctccaaaacgatcttacataatttacttcgctgtgtggagagagcgggcgttgaaattactgatatctgcctgcagccgcttgcggccggttcggcggctttgtcaaaagacgaaaaaaacctcggagtcgccatgattgatatcggcggcggctcgacgacggtggcggtatttgaacaggggcacctgaaggagacagccgtcattccgctcggaggcgaaaacatcacgaaagatgtatcgatcggattgcgcacttccaccgaagaggctgaaagagtaaaaaaacaattcggacatgcattctacgatgaggcttcagaagatgaagtatttgaagtcaccgtcataggaacgaatcaaaagcaatcttttacacagcaggaaattgccaatattattgaagcaagagtggaagagattcttgagattgccgcagccgaaattgagcatatgggaattacagatctgcccggcggctttgtgctgaccggcggacaggccgcaatgcccggagtgctttcattggcacaggaagtgctgaggcacaatgtaagggtcgcaagcccgaattacatcggtgtaagagaccctcagtatatgacgggtgttggcttgatacaatttgcctgccgaaatgccagaattcagggaagaaaaataggctttcatatgccggaagaagccgtgcaggaaatcgcggtctctcacgaagaagaacatcatcagcggccagaggcgcagcagcgtccaaaagcaaaacaaaaaacacaagccgaacacaacaaaccgagcaaaatgaaaaaactattaagcatgttttgggaatagattgatagtcattcggcagattaggaggatttagcatgttggatttcgaaacaaacatagacggcttagcatcaattaaagtaatcggagtaggaggcggcggtaataacgcggtcaaccgaatgattgaaaatgaagtgcagggtgtagagtacattgcggtaaacacggacgcgcaagctcttaacctgtcaaaagcggaagtgaaaatgcagatcggggaaaagctgacccgcggtctcggagcgggagcgaatccggaagtcggcaaaaaagccgctgaagaaagtaaggaacaaatcgaagaagcgctaaaaggcgctgatatggtgttcgttacagccggaatgggaggcggtaccggaacgggagccgcaccggttatcgcgcaaatcgcaaaggacttaggcgctttgactgtcggtgtcgtaacaagaccgtttacatttgaaggaagaaaacgccagctgcaggctgcaggcggtatcacggcaatgaaagaagccgttgacacactgatcgttattccgaatgaccgcattcttgaaattgtcgataaaaacacaccgatgcttgaagcattccgtgaagctgataacgtgcttcgccaaggggtgcaaggtatctctgacctcatcgcgacgcctggtttaatcaacttggactttgccgatgtcaaaaccatcatgtccaacaaaggttcagcattgatgggtatcgggatcgctacgggcgaaagccgtgctgctgaagccgccaaaaaggcgatctccagtccgttactggaagcggcaatcgacggagcgcaaggtgttttgatgaacattacgggaggtacaaacctgagcctctacgaagtgcaggaagcagccgacatcgtcgcttctgcatctgaccctgatgtcaacatgattttcggttcagttatcaatgaaaatctgaaagatgaaatcgtcgtcaccgttattgcgaccggttttatcgaacaggaaaaagatgactcaaaaccgcagcgaccgactttaaaccaaggattgaagtctcaaagccaaaacgctgcgaaacgggagccgaaacgagaagaaacacagcatcaaaacacggtgaaccgccatacatcacagccggcggatgatgccctcgacattcctacatttttaagaaaccgcaacaaacgcggctgatgtaaaaaaggacaagaccacatggttttgtcctttttcttttgtgcacagtcttccttcctattcccgtaatctatacagtgaaaaaagcaactttatacctatgacgaattgattgttttttagtttcatacggttttctacagaatgtgacaatatctggatgtaagattgtctacatttaacgtacagcatcgaaaatgacaaacgattccaatctgaaggagggatacacattttatagggcgttaccaaataaggggggatacgattgaagaaaaaaacgagaaacagatggacaggctccgttttaagcgcgattgtcgtcagttccctgttgtttccgggtgcagccggagcgaacagcacaccgggagcagtttctttcaccaaagatctttcttcctctaagagcattcagcataagatttccgattcagtcaagaagcgttttgaaaaaaatgataaaatcacgtttcttatcaaatttaaagagaaagccaatacgaaaaaagcggtcaaagaagcagaaaaaaacgccaagtctcaatcgctttccgcagcaaaaaccgaatatcaaaagcggtcagccgtcgtttcttctttaaaactggcggctcatgatgcgcagcagaatctgaaaacatatttggaaaaacaaaaaaagaaaggcaaggctgatcacatccattcctattatattgtcaacggaatggcagtcactgcttcgaaagaggtaatggaaaaagccgcctcatttcctgaagtagaaaaagttcttccgaatgaaaaacgtcagcttactcaacgacaatcaaaagctccttttcaaatgaagaaaaaacaaaaagagatcaaagcaaaggaaggcatcgaatggaatatcagccaaattgatgcgccgcaggcctgggcctcaggatacgacggaaccggcacggttgtcgcctccattgatacgggagttcagtgggatcatccggcgcttaaggaaaaataccggggttacgatcctgaaaatcccgcagcgccgaatcatgaaatgaactggtatgatgccgtgtcccataaagacgctccctacgatgatcttgaacacggcactcatgtaacagggaccatgacgggttcagaacctgacggctcaaatcaaatcggtgtggctccgggggcgaaatggatcgcagtaaaagcattttcagatgacggaggaaccgatgccgatattttggatgccggtgaatgggtgctcgcgcctaaagataaaaacggcacgccgcatcccgagatggcgccggatgttgttaataattcctgggcaggcggttcgggaatggacgagtggtaccgcgatatggtgaatgcgtggagagcggcagggatttttccggaattctctgcgggaaatgaagacttatttacaccgggaggaccgggttcaatcgcaaatccggccaattatcctgaagcatttgcgacaggtgcgactgacatcgacaagaaactcgctgatttctcacttcaaggcccctcaccgtatcatgaaacaaaaccggacatttcggctccgggagtgaatatccgttcttcgattcctggaggaacatacgaaggcggctgggacggaacttcaatggccgggccgcatgtggcggcgacggcggctttgttaaggcaggcgaacgcctctattacggtcgatgaaatggaagacgttttgacgcgcaccgcggaaaaactgacagattccgtttttccggaatcaccgaataacggttacggccacggtctcgttaacgcttttgatgccgtttctgccgtaacggacggaatcgggagcgtagaaggcaaggtctcttctgcgggcgaagatcacaatccgcccagctttcaccatgaaccggtctcagtggcttacaaaggggcaaaccttccgttgacggttacagcagaagacgatgtaagcgtaactgaagtcatcctttcctatcaggttgatgaaggagagtggaaaacgacagccgccgttcaaaaaagcggtgatgaaaaaaagggaacataccaggcggaaattccggatgtaacgggaagcaagataagttataaatggaccataaaagatttcggaggtcattctgtagaatctgatacgtaccgggctgacgtgaaaccgagcattacggcgggatacaaagaggattttgaatcacagccggcgggctggtccagttacaggacacatgaccaatgggaatgggggatcccgggttcagggcccggcgccgcattttccggagataaagtgtatgcgacgaatctgtccggcccttatgccgattcagccaacatgaatttggtgatgcctccgattcaagttccggaaacaggacggctgtttttgcaatttaaaagctggcacaagctcgaagaattttttgattacgggtatgtgttcgttcttccggaaggaaaatcaaattgggagcaggcggccgtttacaatggtgactccgcaggatggaacgatgaagaggcagatttatctgcgtataaaggccaaaacataaagctcatgtttaatatgcagtcagacgaagtactgaatgaagacggatggtatatcgatgatgtccggctttcaagcagctctctcggcaaggcggctaaaaaaagtaagcacaataggcaaacacctcccggccacctgaagaaaaaagctgtcagtccgaaacaggccaaaccggcagtgaaatcacccggaaaaagagtgaaacgtgaaacaaacctcctgcctctcagagcgcaaatcagtgtcgccgagacggggaaatccgtatattccgaccctgcaagcggaagctacagcctgtcgcataaggcgggaagctatacgctgaaagcagaggcttacggatttaagtccgcttcgaaacaagtttctattcaatcagacaaaaccgcacaggcagactttacactggagcaaatgccgtccggcacgctaaaaggaaccatcaccaatcagtcaacaggcaaaccggtaaaaggggctgcgctttatgtggtcgaggatgccgcaattgaaccggcggtgacaaacgataaaggggaatattcgcttaaggcgtacgaaggctcctacacaatcaaagtagcggcaaaaggctattacaatagcgaattttctgttgacatcaaaggggatgctgaaaaaaacgtcaagcttaagccgtatatcggttatgaaggggaaattgcctatgataacgggacagaagaagccgcgctgtcatattttaaagccggcagcaaatctgccgttaagatgacgcttaaagatggaaaaggacacggtatgctgacgggaggcctttttaaattttggggcgcagactggcctgatccgggaggtaccgaatttcaagcggaagtatatgatgcatccggccctgatggagctccgggcagcaaaattgccggcccgttccaagctgaagcgcttcgaaacggagaatggaccaaagtggatctcagctcaaaaggaatcgcggtcggaaaggatttttatcttgtgttccgccagacgaaacctgacccttatacacctgccctgtcatctgatgacggcagtccgtactcgaacagaaactggcaataccttgacggccgctggtctaaaaccgataaatcagacggaaactttatgatcagggctttggtcgactacgaagcttctgtgcctgacataacgtcgcctgaagaccggtcatttacaaacaagaagtcaatcacggtgaaaggaacggcttcaccaaaaaccgctgtccgtcttaccaataacggtaaaaccgccgcagaaacgaaagcagatgcagacggcaatttccaggccggcgtcacactcactaaagatgccaatcggctgacggcagcatctgtgacagtcagcgggtcaaccgatgagtcacgccctgtcacggtcatactggatgaggataagccggatgtgacgattgacagtccggcaaacggtgataaaacaaataaagaaacagtgaccgtaaaaggaaaagtgcacgacgcccatttaaaatgggtaaaggtgaacggaaaaaaagctgaagtaaataacggttcttatcaagcgagaaccctcctggaaaacggcagcaatgagatcaaggtcacggcctcagatgaagcgggtaacaaaacaacgaaaaagacggtgatcgatgtcaattacaatgctcccgtcatttccggattggttcccggagcggataaggaattaaaagccggagaatcagtgaaaatcgctttttcaagcggaaagaaattagacgcttccttcgttatccgtctgcctctgacaaacgcccgggcagggaaccaaaacgcaacagagcttccgctgagagaaatttctccgggacgatatgagggttactggacggcgacttcttccgtcaaagcaagcggagcaaaaattgacgttatcgctagagatgactacggaaatgaaacgagacagacggctaaaggaaaactttatatcaatgagtaaaaacagagcgctgccagatcacggcagcgcttttttagttgaagcggacaataggaaagcaaccctttcggccctcgacaaataaaacggttatcccttaaaaattgtactttaccctcaacattaattgacagactttcccacagagcttgctttatacttatgaaacaagagagagaaacagatatgtaagacaaaagaggaaaggggtcagatgtgaaaatctatctggatgtcatttggctgttgaacttttgttttgattctcttttgcttttattgaccgcctttattttaaaacgccaggtgaaaaaaagaagagtggccgccggcggtttcatcgggtcagccattgtgcttctgatgtttacgcctgtttctccctttgtggagcatccggcgggaaaaatggcgttttcagtagtcatcgtgcttgcggcttttggctttaaacggttccgatacttttttcaaaatttgttcgccttttatttcgcgacttttctcgtcggcgggggaatgatcggcgtacattccctgctgcagacagaatcaattgtgcagcaaggcgtaatggtcacaagccagaccggattcggcgacccgatcagctggatgtttgtagttatcggatttccagccatatggtttttttcgaaaaagagaattgaagacatcgagacgaagtccattcagtacgatgaacttgtcatggtgcaggcggaattcagcggacagacaatccgcgcgaaaggattggtggattccgggaatcagctgtatgatccgctgacgaaaacgccggtcatgatcctttgcattgacaaattcgctccgattctcagtgaaaaggaaacggacctcatcaaatccgccagtccgcttgaagtgatagagcggcttgatgattcgttccgccatgcggataagctgaggctgattccatacaggggcgtcggccaggacaatcaatttttactctgtttaaagccggattacgtcacgattttaacaaaagacgaaatgatcgcttgtgaaaaatgcctgatcggcatcagcacgaaaccattatccgcggacggtgaatttgacggaatcgttcatccgaagatgctgacagggaaggctgtaaaacatgtttcctgacgaaaagtctgttattcatcatactcaaaacgcgttgtatttagaagggggaggaagatgaaaaaacttaagctgcgtctgacatatttgtggtataaatggctgatgaaactcggactgaaaagcgatgaagtgtattacataggaggaagcgaggcgctgccgccgcctttgtctaaagaagaggagcaggtgctcttattaaagctgccgagcggggatcaggcggcgcgggccattctgattgagagaaacttacgtcttgtcgtttacattgcccgcaaattcgaaaataccggcatcaatatcgaggacttaatcagcatcggcaccatcggtttgatcaaagcggtaaacacttttaatccggaaaagaaaatcaaactcgccacctacgcgtcgcgatgtatcgaaaacgaaattttaatgtacttgcgccgaaacaacaaaatccgttcagaggtgtcctttgatgaaccgctgaatattgattgggacggaaacgagctgctgctttcggatgtgctcggcacagatgatgatattattacaaaagacattgaagccaatgtggataaaaaacttttgaaaaaagcgcttgagcaattaaacgaaagagaaaagcagattatggaactgcgtttcgggcttgtcggagaagaagaaaaaacacaaaaagatgtagccgacatgatggggatttcacaatcttatatctcccggctcgaaaagcggattatcaaaagactgagaaaagagtttaacaaaatggtgtaaaattttttccatctgacagcccttactgctgcaaggattgccgcagccggatgtttatttctgtaaaatggcggtgcatatttttcccacccgaggagatacttaacgttgtacagcagctcctagtgggagggaaaaacgtgtcaagaaataaagtcgaaatttgcggggtggatacctccaaattaccggtgctcaagaatgaagagatgagaaagctgtttaggcaattacaggatgagggcgatgattcagcgagggaaaagcttgtaaacggcaatctgcgccttgtcttaagcgtcattcagaggtttaacaacagaggagagtatgttgatgacttatttcaggtcggctgcatcggactaatgaaatccattgataattttgacctaagccataatgttaagttttcaacatacgctgtaccgatgatcatcggagaaatccgcagatatttgcgggataacaatccgatccgcgtctcgaggtcgcttcgcgatatcgcatataaagcgcttcaagtaagagagcggctaatcagtgagacaagcagggagccgacagcagaggaaatcgccaaagttcttgaagtgccccatgaagaaattgtgtttgcccttgacgccatccaggatccggtttcactgtttgagccgatttataatgacggcggcgatccgatttacgtgatggaccagatcagcgatgagcgcaacaaggatacacaatggattgaggagctggctctgaaagaaggcatgagaagactgaacgaacgggaaaaaatgattttgcgaaagcgctttttccaagggaaaactcaaatggaagtcgctgaagaaatcggcatatcccaagctcaggtctcaaggcttgaaaaggcagccattaaacaaatgaataagaatatccatcaataacggaaaaagcctttaaaccttgtttaaaggcttttttcatgcgatggtttacgtttgcaaaaaagtaatgtattctaatgtgtaaaagtttttagaaaatttaaataaagtaaacgggggaaacggcaatgattttacagctggacagtgtgtcattaaaaagaaacgggaaatggattttgaaagatattaactggcgcgtcgagaaaaacgaaaattgggtgctgtacggattaaacggagccggaaaaacggctttgctgaatatgttatgctcttattacttccccacttcaggagagatgcaggtgctcggccatcaattcggcaaaacagagctcggtgacaggctcagaaggaaaatcggccttgtttcggcaggtcttcagcacaaattatatgccgcggactccgcttttgaaatcgccctcagcggcgcgtacgcctcaatcgggctgtacgaaactccgagtgagcaggtaagggaaaaagcgatcggtcttctgaaggatttgggcgccatcggttacgccgacaggcggtatgaaacattatcacaaggggaaagacaaagagcgctgattgcgcgggcgcttatggctgatcccaaactgctgattttggacgagcccgtgacgggtcttgattttatggcaagggagcagctgctggacacgattacgtcgatcgccgaaaaagaaaatgcgccgtccatcctttatgtcacccatcacgctgaagaaattctgccggtatttgatcaggcgctgcttttaaaacagggcgaggtgttcgcctccgggaaaatcagggacatgctttctgacgagcggcttacagcgtttttcgatatgcctgtcaatgtcttatggaacaatggccgcccgtttttaacacgtgcaaaagaggcatcatccgtaaaataacataaattcaccctgggggtgctgccatgcggctgagagagacgtttgtctcaacccttaacggacctgatccggatcatgccggcggagggaagcggtgaaaaaagcggaggaagatccgttttttacccgtttcatttcatgaatgaaacgggttttttgatacagccaaaggggagatttccaatgcatcagattgatatgctgttacatcaggcggagaaacggcggcaagacttcatacttattgctgaaagactgatagcctttcccactccggccccgccggcaagaaatacggcagaagcccaaaagtgggtggccggctttttaaaagaaaccggctgctcggtcgatatgtgggatgtgtatccggaagacccgaatgtagtcggtgttttaaaagggacagattcaagcaggcatcaaagcctgattttaaacggacacattgatgtggcagaagccgggggcgaagactggcactctgacccgtttcagccgctcgtaaaagacggcatgctgatcggaaggggcgccgctgatatgaaaggggggttggcgtgtgttcttttctctctgaagctgatccatgatgccggcattaagcttccgggcgacctcattgtacagtctgtaatcggagaagaagtcggtgaggcggggacgctggaatgctgcaaacgcggctatcacgcggattttgcggttgtcgcggatacgagcagtctgcatattcaagggcagggcggtgtcatcaccggctggatagaattgaaaagcaaacaaacatttcatgacggcatgaggcgcaatatgattcacgcgggcggaggcacattcggagcgagcgccatcgaaaaaatggcgaaaatcatcgctgccttgggagagctggagcgccactgggcggtaacgaaaagctatcccggctttgcgcccggcaccaatacgatcaaccccgccgtcattgaaggcggaagacacgcagcgtttgtcgccgatgagtgccggttatggatcaccgtccacttttatccgaacgaaacgcacgaacaagcagccgcagaaatcgaagactatattaatcgtgtcgctgacagtgatctgtggctcaaagaaaacaggccggtgttcaaatggggcggatcttcgatgattgaagacagaggagaggtgttcccggcgctggaaatcgacccggaccatccggcagtttctgtcttggctgcatcacactcagccgtcaaaaaacaggagcccgtcattaatgtttcccaaaccgtaactgacggagggtggctttatcatgccgggattccgagcgtcatatacggtcccggcgatttaaaaaacgcccactccgtaaacgaggaagtgtctgttgatgagcttatggactatacgaaaatcatgctgagatttatcctcggctggtgcagccgcaaaaaagattgcccgatgtgacaaggttcagcccggccgttcatataataggaaaaagaacgggcaaagggcgtgatacggatgatcagcatatctgaatttcaaataaaagatgtggtaaacgtgtcgaacggaaaaaaactcggaagcatcggtgatattgatattaacgtgacaacgggaaaaattcaggcgattattttaggcggcagcggaaaagttctcggttttttcggaaaagaagaggaaatgatcattccttggcgaaatatagttaaaattggggaagatgtcatcttagtgcgtgtaaacgaaccaaaggggggagcgtaatcctccctttacttgtaaaatgccggaaatctcaatgtttccggcacatttatttatctcatttttcaatcagccgctaaacgtatgctcaaaattgtgttaaaatgagttggaaattacgcttttttaatgtttgtcgaaaggttggatctccatgaatacatatcacccgtttagtcttaccaccccctcggcactcatgatagaagactggaactgtgtgaatcagcttaacacaaaggtcatcgccggattcacaacgaaaaacggcggggtcagcaatcctccgtatgagtcattaaataccggattgcacgtccgggacgaagctcatgatgttgtgacaaaccgtgaagtcatagcgtccttatgcggtactgatctggattcctgggtgttcgccgaccagacacatgaaaaccgcgtccggcgcgtgacagccggggataaaggaaaaggagcgagagactattcttccgcattccgcgggacggacgggctctacacgaaagatgcgaatctttttttggccctttgttttgcggactgtgtgcccttgtatttttatgacccggtaaaatccattatcggcgctgcccatgccggatggaaagggacggtcaaacaaatcggacgcatcatgacggaacgctgggtaaacgaagaaggctcccgtttaacagatattcaggctgtcatcggtccgtccatcagcgcgggaagctatacagtcgacgatcgcgtcatcaatgaagtgcgggcgctgccttttacggctgaatccgctatatgcgaaacggaaaaaggccagtatcagcttgatttaaaagaggtcaaccgccttcttctgatacattgcggtattccggaagaaaacatttcagtcagcggtttatgcaccgaacgagagcgtgaactattcttttcacaccgccgcgacaaagggaaaacgggacgcatgatgtcctttatcggaatgaaggaggcgtaagatcttgcgtgttgctgatcaattacgacatataaacgaaagaataaacgaagcatgtaacagatcgggccgaagccccgaagatgttaccgtcatcgcggttacaaaatacgtatcagccgaaagggctcaagaggccgttgatgccggtattacaagtctgggagaaaaccgggatgccgagcttatccataagcaggaagtcatcaaaggtagcccggagtggcactttatcggcagtcttcagtccagaaaggtgaaggccgtcgttgaccgtgtatcttatattcattccttagacagactgtcattggcaaaagagattgaaaaacgggcgcagcatacggttcgctgttttgtgcaggtgaatacttcgcttgagccgtctaagcacggtttgaaaacagaggaggtcatcccctttatcagagagctttctgagtttagaaacatttctgtagagggcctgatgacgatggctcccctgacagacgatacagaaacgatcagagcctgcttccggcaattgcgtgatctgagggatcaggtgcaaaaactgaatcagacaaacgcaccgtgccgggaactgtcaatgggcatgtcaaatgattatgaaatcgctgttgaagagggcgcaacttttatcagaatcggctcttcattagtcggaaatgaaccggggggtgtaaacaaatgagcatgaaaaataaactgaaaaactttttctcaatggatgaggaggagtacgagtacgaatacattgaaacagagcaggatcatcaggaagagcatgaacagcagaaagataaacagcctgcttacgctcagaagccgcagggcaagcagaacgtagtaagcttgcaaagtgttcagaaatcctctaaagtggtcttgagtgaaccgcgtgtatatgcggaagcgcaggaaatcgccgatcatttaaagaacaggcgggcggttgtcgtcaatctgcagcgcatccagcatgatcaggcgaaaagaatcgtcgactttttaagcggcaccgtctacgccatcggcggcgacattcagagaatcggttcagatatttttctgtgcacgcctgataatgtcgacgtttccggcacgatttcggagcttataaatgaagacgaacatcagaggtggtaaagcaggatgattctttatcaaattttttccgttctgagttatttaatttacatctactcgtttgccctgatcatctatatctttatgtcatgggtgccgagtacgagagaaacggcggtcggacggtttctcgcagcgatttgcgaaccgtatttagagccgttcagaaggatcattccgcccattgccatgctggatatatccccgattgtagcgattatcgtgcttcggtttgccacgacgggactttggggcctataccgcatgatcgcaatgtatacttgaatgcgacagtttgatacgggcttggcaccagccaagcctctttacatagaaaggaaagaacatgagcgatatttaccagcacttcagacaagacgagcggccttttattgatcaggcgcttgaatggaaacagattgtcctggaccagtatcggatgaagctgactgatttcttagatcccagagaacaggtcattgtaaaggccgttatcggcgacgcctgcggtcttgcgtttttcggaggatatgacagagccgagcgcaaacgcgcgattttataccctgaatatatggaacctgaacaggatgattttgagcttcgggcttttgacgttcaatacgctgaaaaattcgtcagcattgaccaccgctctcttctcggatcattaatggggatcggcttaaagcggcagaaatacggcgatctgattttctcagaggaagccgtgcagctgatcgtctccggtgaaatcgccgattttgtcagcactcagctgaccaaggcgggcaaagcgccggtaaagcttgagaaaatcgagctttccgctcttcacattcccgcttcagatgtcgaaataagggatgacacggtttcttcattgcgtctcgacgccgtctgcgcttcaatgagcaggcaatcccgtcagaaagcgcaggcgcttgtgaaaaacgggctcgttaaggtgaattggaaagccattgaagatccgtcttatcaggttgctgaaggggacatgctctcgattcgcggcttcggacgatgcagtttggcaaaagttgacggaaaaacgaaaaaagacaaatggaaagttacatttgaacggcaaaaatgagtcgttttttcagtttttttctccatctgtgccgtatttgttttataatgtgaactagataaccgtactgaaatgtaaaaatggaggtggcaatatgccattaacgccgaatgatatccataacaaaacgtttacaaaaggttttcgcggatatgatgaagatgaagtaaatgaatttttaatgcaggttagaaaagattacgaaatcgcactccgtaaaaaaacggagcttgaggcgaaagtgaacgagctggacgaaaaaatcggccactttgccaatatcgaagaaacgctgaataaatcaattctcgtagcccaggaagccgcagaagacgtaaagcgcaactcgcagaaagaagcgaagctgatcgtccgtgaagcagaaaaaaatgctgatcgcatcatcaatgagtcgctttccaaatcaagaaaaatcgcaatggaaattgaagagctgaaaaaacagtctaaagtcttcagaacacgtttccaaatgctgattgaggcgcagctcgacctgctgaagaacgatgattgggatcatctgctggaatacgaagtcgacgcggtttttgaggaaaaagaataattttctgattttcttgacattctccggcccgttcgaatataatacgttcataaattcagatgaaaagacgattgaaagggaccggcatgactcaaaacaggctataaagcgacccggggaaggtgaaagcccgggatggccggaatcatgcagatcagccctttagtttcctttctgaaccgagagtaggataggacgttccatcacgttacgatgttcgagaggaaaagacggatgatccgttttttctaaaagggtggtaccgcgagataagctttctcgtcccttatgggatgagagggctttttttattttctgaaaaatgttgtggaggaatgaaaatggattacaaagatacgctgttaatgccgaaaacagattttccgatgcgcggaaatctgccgaatcgtgagccggacatgcaaaaagactgggaggagcaggacatttaccgtcttgttcaagaacggacgaaagaccgcccgaaattcgtgctgcatgacggacctccttatgcaaacggagacatccacatgggccatgccctgaacaaaatcctgaaagacttcatcgtccgctataaatcaatgagcggctacaacgcaccgtacgtgccgggctgggatacgcacggactgccgattgaaacggcgctgacgaaaaacaaaaaagtaaaccggaaagaaatgtccgtcgctgatttccgcaagctttgcgaagattatgcatggcagcagatcgaaagacagcgcgaacaattcaagcgtctcggcgtcagaggcgattgggaaaacccgtatgttacgcttcagcctgaatttgaagcgcagcagatccgcgttttcggcgagatggcgaaaagaggctatatttataaaggtctgaagccggtcaactggtcgccttcaagtgaatctgccttagcggaagcggaaattgaatatcaggacaaacgttccgcgtctatttatgttgcgtttaaggtgaaagacggtaaaggcgttctggaaaacggagaaagcttcatcatctggacgacgacgccgtggacgatgcctgccaacctcggaatttccgttcatcctgatcttgaatacaatgtcatcaaggttggagacaaacgttatgtagtggctgctgaactgatcgaaaacgtagcggaggcatgcggttttgaaaatcctgaagttgtcgcatcatataaaggcagagaattagaatacatcactgcagaacatccgctgtacggcagagattcactcgtcatgctcggtgaccacgtcacaaccgatgccggaacaggctgtgttcatactgctccgggccacggggaagatgactttatcgtcggccaaaagtacggcttagaagtactgtgccctgttgatgaaaaaggaaacatgaccgacgaagcgccgggctttgaaggaatgttttacgataaagccaataaaccgatcacggagaagcttgaagaaaacggcgcgctcttgaaactcgagtttattacacactcctatccgcatgactggagaacgaaaaaaccgaccatcttcagagcgacagcgcaatggtttgcgtcaattaaagatttcagatccgatctgcttgatgccatcaaacaaacgaagtgggtgccggagtggggcgaacagcgcctttacaacatggtgcgcgaccgcggtgactggtgtatctcaagacagcgcgtctggggcgttccgatcccggtattttatgcagaaaacggtgagccggtcatcactgacgaaacgattgaacacgtgtctgagctgttcaaacagcacggctcaaacgtctggtttgaaagagaggcaaaagaccttctgccggaaggatttacacatccgggaagcccgaacggaatcttcacgaaagagcaagacattatggatgtatggtttgattcaggttcttcccatcaggctgttcttgaagaacgtgatgatcttgtccgtccggctgatttataccttgaaggctctgaccaataccgcggctggtttaactcatctctttccaccgctgttgcagtcaccggcaaagcgccgtataaaggcgtattaagccacggatttacacttgatgcaaacggccgtaaaatgagtaaatcactcggcaatacgattgacccgacaaaaatcgcaaaacagcttggagctgaaattctgcgtttatgggtatcttccgtaaactatcaggccgatcacccggtttctgaagatattctgaagcaggtcgcggaagtataccggaaagtccgcaacacgttccgcttccttcacggcaacctgttcgatttcaatccaagcgtcaatgccgtggatgtaaaagatctccgcgaagtggatcaatatatgctgatcaagctgaataagctgatcgataaggtgaaaaaagcgtacgatgaatacgaatttgcggttgtttatcacagcattcacaatttctgtacgatcgagctcagctcattctatcttgattttgcaaaagatgttgtgtacatcgagcatgcggatcatccggaccgccgcagcatgcagaccgtcttctatgaaacgctgctggcgttagtgaaactgacggcgccgattctcccgcatacggcggatgaaatgtggtctcacttatcatttgttgaagaagcgagcgtgcagctgacagatatgccggaaaccattgctgttccggacagtcaggcgacagaagaaaaattcgaccgcttcatggagcttcgaaacgacgtgctgaaagctttggaaacagcccgtaacgaaaaaattatcggaagatcattggaagcgagcctgactttgtatccgaacaaagaaaaccgcgacctcttgtcatccattaaagaaaacatcgcgcagctgtttatcgtctcagaactgacagtaaaagacgaaagtgaagcgccggaaaacgcgcaaagcttcacaacaggaaaaatgaccgtagaaaaagcggaaggccagatgtgtgaacgttcccgcgtaatttctaaagatgtcggagccaatccgaaatatccgacattatcactgcgcaatgcggaaatcgttgaaaaatattatcaaaaataataaatgagaaagcgtccggtgtcagccgggcgcttttttacatgccagcaatgtcatcgattagaacgacaggaaaaatcttatgggcttcaaatgacgctctgagggcaacaataaagctataacatcaagagcaggagttgtgatgaatgaatgatcaactgaccgcaatccacacggagcttctcatgatgaaagaagaacttcaatcaagattattcgaatattcttgctttcaaatgtcagcatctgttgaaccttcaatgaacgaccaagaagcaactctgatctatcatataaaagaagaacttcaggatgttcttcttgccctgtctaagtttgaaaacaatacgtacggttattgtgaaaaaacaggcgcccccattccgattgaaaaacttgcggtgctgccgacggccagaaccgctgatgatttttattatcccgctcaatttgaaaagaaaacccttccatactgggtaaccggagattatgcatatgatcaggcgctgtatgagtgacagcgtctgtttgcatacgcttatgatctgcctttactccggcatcttttactgataaaattcataaaggataaaagtaactgtatactggaggaacgtgtgtgctttattatcttatcgctctttttattattattgccgaccaattgaccaaatggcttgtcgtcagccatatggaattgggacaaagcatacctgtcatcgaccaggtgctttatatcacatctcatcgcaacacgggagcggcgtgggggattttagccggccaaatgtggtttttctacgtcattaccatcgccgtgattatcggaatcgtttattacatacagcgttatgcaaaagggcagatgttactcggaatttctctcggcttaatgctgggcggtgcggccggaaactttattgaccgggcggcgcgccaggaagtggtggattttattcatgtcatcatcgtgaattatcactatccgatttttaatatcgcggactcctcactgtgcgtcggtgtaatacttttatttattcatatgctgtttgacagcgggaaaaagaaggagcaataacatgaatcaatttgagataaccgttcagcctgaacaaaagagcgaacggattgataaatttttggcttcaacgggagaaaactggtcacgcactcaagtgcagcaatgggtaaaagagggactggtatccgttaatggcaaatccgtaaaagcgaattataaaatgcagcccggcgatcaggtaaacgtcaccattcctgaaccggaagaattggacgtgcttgcagagccgatggatttggacatttactatgaagaccaggatgtcttggttgtgaacaaaccgcgcggcatggttgtacacccggcgcccggccatgtgacagggacgcttgtaaacggactgatggctcactgcaacgacctttccggcattaacggcgtcatgcgcccgggaatcgtccaccggattgataaagatacttccggtctgttaatggtcgctaaaaacgatatggcgcatgaatcactcgttaatcagctcgtcaataaaaccgtgaccagaaagtacacagcggttgtccacggggtgatttcacatgatgacggaacaattgacgctccgatcgggagagataaaaaagaccgtcaaagcatgaccgtaacaagagaaagcagcaaaaacgccgtcacgcatttccacgtgcttgagcgttttcaagatttcacgctcgtagagtgccggcttgagacaggaagaacgcatcagatccgtgttcatatgaaatatatcgggtttcctttggcgggcgatccgaagtacggaccgagaaaaaccattgatttcaatggtcaggcgcttcatgctggaatattaggttttgatcatccgcggacgggcgaatacattgagtttgaagcgccccttcctgaagatatgaaaaaactcattgaagatttaagaaatagccattgacagcgcctttcttttctgaaataataaaaacaagctgaatagattctttaacacagtccagagaggctgagaaggataacggataggacagaagagatacgcatgtgtcttcgtcctggaaaggaacccctctatgctctggcaggaggggttttttcttcttatatacgaatggagaggtgtcacgagtgaatcaaaaagctgttattctcgacgaacaggcgatcaggcgggcgctgacaaggatagctcatgaaatgatcgaacggaataaaggaatgaatgactgcattcttgtagggattaaaacaagaggcatttatttagcgaagcggctggccgagcggatcgaacagattgaaggaaatccggtcaccgtcggggaaatcgatatcaccctttaccgtgacgacctcacgaaaaaaacgagcaatgaagagccgcttgtaaaaggcgcggacattccggccgatatcacagaccaaaaggtcattgtggttgatgatgtgctttataccggccggacggtaagagctgcgatggatgccctcgttgatgtcgggcggccgtcatcgatacagcttgccgtgcttgtcgacagagggcaccgggagctgccgatcagagcggactatatcgggaaaaacattccgacctcaaaagctgaaaaagtgatggttcagctgagcgaagttgatcacactgatatggtcgccatttacgaaaatgaataatcaccctttttaaatgcattccagagagtttgcaaagaggattttaaaacacaaagccgggcggatcgacgcggccgggttttgtatgcctctttgcgcaaaaagcaaagaggtttttttataccatttgaaagtcaaccgggaggaaaacgccatgagtaagaaaaaagtaaacctgggagtcagggacgtccccaatccattgtcctggctgtcattcagcctgcagcatttattcgccatgttcggttcaaccatactcgtgccgaaactggtcggaatgagcccggcagtggcgcttgtcacgagcggaatcgggacactcgcctatctcttggtgacaaaaggccagattcccgcttatctcggctcatcattcgcctttatatcaccgattatcttggtgaaggcgacgggagggccgggggctgccatggtcggcgcttttctgtcgggaattgtgtacggcctgatcgcacttctcatcaggcagcttggaacggggtggctgatgaagctgctgcccccggtggtcgtcgggccggtcatcatcgtcatcggcctcggactggcaagcacagccgtcaatatggcaatgtatgctgatccgaatgcgaaggaactcgtctacagcttgaaacatttcagtgtagccggcgtcactttggccatcaccattatctgcgccatctttttacggggatttttaagcctgattccggtattgatcggcattataggcggatatctgtttgcgctgacacagggcatcgtcaattttcagccggtcattgatgcaaaatggttcgccgttcctgaatttatcatccctttcaaagactatacgccgtcagtgacattgggcattgcggctgcgatggtgccggtcgctttcgtgacgatgtcagaacatatcggccaccaaatggtgctgagtaaagtcgtcggacaggatttcattaaaaagccgggactgcaccgctccataatgggggacagcgtagcgacgattatcgcttcgttaatcggaggcccgccgacgacaacatacggcgaaaacatcggtgtactggcaattacgagagttttcagcgtctttgtcatcggcggcgcgggagtgattgcgctgtgcttcggatttatcggaaaagtatcagcgctgatcagctctgttccgtccgcagttatgggaggcgtttccttcctgctcttcggaattatcgcctccagcggcttaagaatgctgattgacaacaacattgattatgaaaacaagagaaatttaattatcacatccgtcatcctcgtgatcggcgtcggaggggcttttattcaagtatcaaaaggcgggttccaaatatccggcatggcgcttgcggcaattgtcggagtcatcctgaaccttatcctgccgcatgcaaatgaagaagacgcgatggcatcagaaaaacaaaatcatatgtaaaaccttttaaagaaagtccagagaggcttggaagggttataacgggaagaagctgtacgctgcttctctctttaaccgcaccccgagtctatagaccggggtgtttttttacggccttcaagcggaaacggaggagaaaaacatgaatcatttaacggcgatgtctgaactgagcactgctgaaattacagaactgctgcgtgaggcaaaagcgataaaagagggtacagtccgtcccgatctcgcgggaaaattcgttgcgaatctgttttttgaaccgagcacgaggacgcggttcagctttgaagtggcggaaaagaaactcgggatgaacgtgctcagcttagacggcacgagcacaagcgttcaaaaaggcgagtccttatacgacacggtcaaaacactggaatcaatcggagcggacgcctgcgtcatccggcacagcacggatgaatattacaaagatctgaccggcagagtcaatattccgatcttaaacgccggcgacggctgcggccagcacccgacccagtcgttgcttgatttaatgacgattcaagaggaatttgagacctttcagggcctgacggtttccattcatggcgatatcaaacacagcagggtggcaaggtcgaatgccgaagtgctgacaaggctcggcgcacgtgtactgttttctggtccgccgcaatggcaggatgagaaaaacgccttcggcacctgtgttcagacggatgaagccatacaagcttcagatgtcgtcatgctgctccgcatccaaaatgaaaggcatcagacagaagccgaccaaaaaggctacctggaagcatacgggctgaccgcaaagcgggcggagagcatgaagcggcatgccatcatcatgcatcccgcaccggtgaacagaggagtcgaaattgacacaacattagttgaatgcggaaaatcaagaatctttaaacaaatggaaaatggtgtgtatatcagaatggcagtcttaaaaagagcactgcaaaccaatgtgaaaaggggagaagcggcttatgtcttatctcattaaaaacggctggatgttaaatgaacaaggagaaaaagtggcacaagatatccgggtaacgggtgaatttatttcggaaaccgggcttctgacagcgaaagacggagaaacggtgatcgacgctgggggactgttcgtttcaccgggactcgtagaccttcatgtccacttcagagaaccgggcggcgagaaaaaagaaaccattgagacgggctctaaagccgcggcgcggggcggctttaccacagtcgcagccatgccgaatacaagaccggtgccggatacgaaagagcagatggaatggctgcaaaaccggatcaaagaaacctcatctgtcagggttcttccttacgcatccattacgatcagacaaaccggcgaagaaatgacagattttgaggcgcttcatgaagc

SEQ ID NO: 26 - DNA, 80564 bp, Bacillus amyloliquefaciens
aaaacgcgtcgacgcgttcgctgctgccgacatcaaaggaaatcattccgccgaaaccggagctttgcgcttttgtcagctcatggcccggatgtttcgctgatcccggatagtagagcgtttgaacggcatcatgcgcttcaagcagctcggcgattttcccggcgctgtgattgatagcatccattctgagtcccagtgttttaatgcctctcattaagagccatgaatcctgcggtcctaaaacgccgcctgttgagttttgcacgtaatgaagcttttcaccgagctctttatcagccgtgacgactaagccgccgacgacatcgctgtggccgccgagatattttgtcgcgctgtgcagcacgatgtccgccccgaagctgagcggctgctggaaatacggcgtgtaaaacgtattatcgacgataagcaatacgcccgcttcttttgctatgtcagacatcagtttgaggtcagtcactttcaatagcgggtttgtcggtgtttcgatataaatggctttcgtattcggacggatggctttttggactttttctttgctgctcgtatcgacaaagtccgcttcaatgccgaagcggttcagcacgcctgtcatcacgcggtaagtgccgccgtatacatcatccgtcaaaataacatgatcgccgctgtcaaacagcatcatgacggcagtaatcgcagccatgcctgagccgaacgcatatcctgccgcaccgccttcaagctccgcaattaagctttcaagcgccgtccgcgtcggattggccgttcttgaatattcataacccgtgtgctcgcccgctttcggctgccggtacgtgcttacttgataaatcggtacggaaaccgctcctgttttttcatctcccgtaattcctccgtgcaccatcagcgtttttttcttcatcttactgacctccttgaaaaatgtttttgcttatatatcgatcgctgccgtcagggaaaatagtgacgatatttgatccggcgggcgcttttttcgcttcttcaagcgctgcataaagagccgcccctgaagagcttccgattaagaggccttctttctcggccgcttctctgacaagcgaaaacgccgtatcgtcttccaccgtgtaaatggcgtcaaaatggttctcatccatataatccgggataaactccatgccgatgccttccgttttatgggcatgcggctctccgccattcaggatcgagccttccggttcaacgatcaccgttttgacggcaggatttttctcttttaaataagctgccgtaccggcaaaagtgccgccggaaccagctcctgcgacaaaagcgtggatatccccgccgagcgcgttccatatttcgggcccgatcgttttatagtaagtcaatggatttactcggtttttaaattgcagaacggcataagaattattaatctctctctccagttcaaccgcttttcgaatggctccctgcatgccttcttctctcggcgtatgcacgatgtccgccccgagagctttcataatttgctgcttttctctgctgaaatgctccgggacgcaaaaaacggcgcgaagctgatgctttctggcgcacagagcgagtccgatcccggtgtttccggcagtcgcctcaatgataacgccgcccggtttcacctttccagtgcgaagcgcatcttcaatgagcatcccgcccagcctgtctttaatgcttccgcccggattcatcatctcaagcttagcataaaccgctgttccctccggtatatcaaaatgcttgagacggagcagcggtgtatttccgatcagttctgtaatatctgttatcacgttcaagatatgtcctcctcctggaaaagcggaggagaacgagaatcccccgcttagtgaattcgtttgatgacattcaggacaagctcagttgaatgaacggcagcctgttctaaaaatttatcaaatgaaacgtcagattcttttccggcaatatcagataaagctctgatgacaacaaaaggcgttttgaactggtggcacacctgtgcgacagccgcagcttccatctcaaccgcgtacaaatccgcaaatttggcgcgtacgtcttcaacccgcttcggatcattcataaaagaatcacccgtagcgattgtgcctttggcgacttgaatgccgttcagttcagaaaccgcttcctcagtaatgctgatcagcttttcatcagctttgtatgctgccggaagacccggcacctgtccgtattcatagtcaaacgccgtcacatccacgtcatgatggcggacatctgttgagatgacgacgtcgcctacattcaatgtatgatgaaaaccgcctgctgagcctgtgttaatcacataatcaggtttgaaacggtcaagcagaagcgtcgtgctgatcgccgcgttgactttcccgatacctgatttcagcaagatgacttcgatgccttcatagctgccagttgtaaactcacagtgagcgatcatctcttgttttgcgtctttcagtttgcttcttaaaatcgtaacttcctcttccattgctccgatgactgccagtttcatttatacacaatcccttcgatttaccgtttaatcgcctccattatccagacaaagtcattttgctgcgtaaaccgcgcggcaaatccctcttctgaaaagatgtttttcattgtcgcgagtgtcggataatgttccgtctttaaatcgtccgctaattgatgatagccgtttcggcttgctttttgaatggcttcatcataagcttcatgatctttaaagacagtatcggcaaacactattttatcatgcttctgaaggattgcgccatactgctttacagccgttcgcttttcttcatcggttaaatgatgaaaggcgtacgagctgacgatggtatctatttgaaaaggcggagcgggaaactccagaaaatctccgtcactgaacacggctttgtcagaaagcttgtcagccgccagttttctcattgacggagacggttctacaccaaacacctttttgttcgcggcggctaatttcgccgttaaattccccgttcccggtccgaactctaaaacgtttgaacctgaaagtgcgacaatgctgtcaagaatgttgtcatatcctttaaaaacagcagcatattgtttgtcagccccgtgcactgtggcgtcataagtcgctgcccaatcttcaaataaaggaataaattcacggcccatatttttcactctccatattttataattcctatgagtatagtatggattaatcgtggaacagttcctatcctatcacaaaaaagaatggaagggtactaaaatactctgggattattgcgcaattacggcagaaaggcttatactttcattgactcagaagtaaaatcaggaggatctgtactgatgaattttcaattggatttaatcaaagataaagtagaatttttcgaagcggcatctttgcaggagcttgaaaagaaaataaacgttcagattgaaaacaaccaggcgattatgcttcgcgtccgttccgtatcccatcaggtgacggccgttgacggcagaatcctttacagcgcgtcggtgcatttttcagctgacgtatgacagaaaaaagcagctgaataatcagctgcttttttgcggttattttaaggtttctacttttgtcggcttccagccttttttgtctttccaagtgatggtgacctgatactttttgccgttcgttttgtctaaaactttacccttcgcatcttgcggacttccattgtttccgagccacagcactgtcatgtgatcttttgacacgccggttgcgtaagagatggcgtcaagcatttcggcccagtcttcagagcttgagtcatacgtcgccgcatgttctcccgtctgctttgtgccgaccgctttccattttgggttaacaattgttttctcgacatcgcttgatgagccgccctctgttatttttgcgcctttaaaaggatcgcttgaatcagagtcttttttgctgctgtcatcacttttcgatgaatcatcgtcttttttgctgtcagagtctgaagatgaatcagatgtgtccttatcttgtttatcttttttgtcatcgtctgatgccgtatcttttttgctgtcttttatgtcttcatccgatgtctgcttcgtcttgcctgatgcaggtgtttcctgcttctggctcgtgtccgctttttcgctcacgtcgcccgacggactgttgatgaagaggctgacggcaacgacgacaataagaatagatacgatagcaattaaaatgttaagcaccatatttgcttttctgcgcttatcacggttttcaaaacgagattgtttattgctcaatcattctgcactcctttatccctcttgctcagcatatattttaacatgggctgagcggttgttctatgtctgatttatttcattttcatgtacctttttaacaatatcataaaacactgtatttgtcagagccttatcccccggcgtgtccatgtgcagcaccacgagagcgtatttcggcttgtccgcgggaaagtatcccgcaaaccatttgtggtaaagcgtctgtttttcttttgtgaacattcccgtctgggccgttcccgatttgcctgctatctcatacggcagatcctgaaaccttcggccggttcctttcggtgaggtgacgacttctctgagaattttttgaagctgctgcgccgtatatttgtcgatgttttccccttttaacggctgatctttgaatgacgccatcgtcgttttgtttttgtattcaattttgtccgcgattttgacttgttttttttcaccgccgcgcgcgatcgccgccatcatattggcgacttcaagaggcgtgactttcacgtttttttgcccgatcgccgtctgtgcgacggctttttttacggttttgtctttgtcatctccccaaatgaccccgcttttttcattatacagctgcctgaatccgtcttcccggtacagcttgccttcccagcccgcccgctgggtgagaccgagtttttctgccatgttttcaataacggaatcatcttttttgatcaatttttccgcaagacttgtaaacgtataattgcagctttgggcaaagctttctccaaaactgagcgtgcctttgtcatcccccggctctccgtacaggttgagattgcagttaaaggatgtgcccggcttcacttcgttttgttctattgcggctgcggcgatcaccgttttaaatactgatcccggataaatcggcgtcagcatgtaattttgcagtgtctgctgctttgacatgtcggcgtcaggctttgataccattccgagcacactgcttttttcaatgtctaaaaggacggctccccccttttttaacccgcggtctttcaatacatcttccattgctttttgaatattgcggtcgatggaggttttgacttgcagcggataaaacgcgtttgcttcagccgtatatttgacgtccattccgaataaagggtttccccttccgtcgacatgatacaaaagttttgtgtcctgatccgcaagtaaaaactcatcaaacgtccgctccatcccgcttgtcccgatttttgccgtgatcggcagttccttcctgccggggtatttctttttcaaaagctcagggtcctggtttgtcgcgccaaacaaatgagcggctatgtttgtttctttgctgtctttcatatatacgccgtaaatgccgggatatttcaaagaattgatatttgacacggattgtttcgtcaaatgttttatttttctgctgttcaggatcaccggtttttttgcttccgtgagcagctgcctgagctccccctgtttcattccgagaatgtctgatacccggtcaaccggccaatcctgcgtcacgagaaagggaaacagtatgacggcaggctgcttttttccggtcagttctttgccgttccgatcaagaaaagagccgcgtccgtctgaaataaggacttcttccgtccgctgcttgacgctctcctgaatcagattaatattggattttgaaaaagattctgtgaaaaacagctgaatttcagccagcctcgcaagcagaaagaaaaacacgagcagaaaacaaatcacggccgctttcagcctttttgatacgatcataaaaaacacctcatccacattttggacgaggtgtttcattgttaaacggatcttatgaaattttcacaattttcacgagcatttctccgcccggcgtctgaactgtcacttcttcgtccacttttctgccgagcaggcttttggcgattggcgagtcgtttgaaattttcccttcaaacggatcagcttcagcgcttccgacaatcgtgtaagattcttcttcaccgtccggcaattcgatgaatgatacggtttttcccaaaccgactacatttgaaccgccgtcgtcctcgatgatcttcgcattgcggatcatgttttcaagcgtcgtgatgcgcccttccacaaatgcctgttcttcttttgcggaatcatactcagagttctctgacagatctccgaagcttcttgcgattttaatgcgttctactacttctttacgtttaaccgttttcaattgctctaattcttgttcaagtttttgttttccttcgtgagtcatcggaaaaactttttcttgtgccatgttccttcactccttggtggttgtccctcaacaataacgtgtgattatgtatgagagcataaacgaaaaaatcaagaatgagaacacagggcagtcctcgttcttctctcccatataggtactgtttatcttaaactgaatatgtgttttctgcaaatgtttcggtttataaacagggaaagaagggaactgtctcattcccttccagcctatacataatatggtctgagttatttatgtctatgctatggtattacaaaattgcattttgttcaaggatcgtttgaatcttcgtgaccatcagatcaatcgcgacgtggttttgcccgccttccggaataatgatgtccgcgtagcgtttcgtcggttcaacaaactgattgtgcatcggtctgacgacggacacatactgctcaatgacagaatcgattgaacggcctctttcgttaatatctctcataatccgtctgatgatacggagatccgcgtccgtgtcaacataaagtttcatatccatgaggtcgcgaagccttttatcttcgagaacgagaatgccttccagaataatgacatccttcggctcaaccggaatggtttcctcagatcgcgtatgcagtttataatcataaatcggcttttctatcggccggtaattcaaaagctcttgaatatgctcgattaaatagtcattatcaaatgcgagcgggtgatcatagtttgtgttcagcctttcttcaaacggaagatggctttggtctttataataaaggtcttgctggatcattaaaatcgagtgtcctttaaactgctcatagatggaacgggtgacgcttgtttttcctgatccggaacctcctgcgatgcctataactacaggactcttacccattggtgattacttcccctttctcatcatgttgctcggataaatctttttgtctactttaaatgtaacgatttgcaggggatggcgggcagcatcaagctcgtttccgtcttcgtcccaaatagtgccgattgtgaatgtgaaattgtcgatttcaggaccgaaaaattccacttcgtcaccttgtttaaagaaattgcgctgctggagcgtcaccatttgagtttcctcgttatacgcgagcacgagaccggcaaaatcaaatgttgttttctttccgtgttcaccgaacatctgctcttcatacccgggcgtgccttcaaagaaagcaggcgcggtatcccggtttgcacatttgtccagctcatccagccattctttttgaatgacaaagttttcaggatcagcgcagtatgcgtcgatgactttgcgatacacgctgacaaccgtcgcaacgtaatgaatcgatttcatccggccttcaattttcaggctgtcgatgcccatctcgatcatttgcggaatggattcaatcaattttaaatctttcgggctcatcgcaaacggagcgtcttcttcgccatagagcgcgaccgcgtttgcaccgtctgtctgatacaggtcataatcccagcggcaggactgacagcagccgccgcggttggaatcccgggctgtcatgtgattgctcagcacgcatcggcctgaataagcaatacacatagcgccgtggataaaggtttcaatttcaatatccactttttccttcatttctttaatttccagtccgctcgtttcacgggcaagcaccacgcggtcaagcccttcttctttccagaactgcaccgctttccagttggaaagggactgctgtgtactgaggtgaatttctacgtccggggccactctccggcatgtttcaataatcagcggatcagcgacgataattccggcaacttttgcgtctcccaacgcttttaagtattcttccagaccgtccatattttcattatgggcgaaaatgtttgttgtcacatatattttcgccccgtattttttggcaaattctacgccctctgcgatttcttctattgagaagttatccgcatttgagcggagtccgtattcctgtcctccgataaaaaccgcgtccgctccgtaatgaacggcaatttttaatttttcaaggtttcctgccggagcaaggagttcaggttttttcgtaatgacgcgttttccgtttacgactttggaaatggtttgatttacggctgtcatccgttgcaccctcctttttaatagaccgtttctttaaagaagaatcctgtgtcgatgcttctgttcacaggctgaatgctttcaatccgctctatccagctctcttttttctctttgtatgtctctcggctttcgaagcacaaatcgattgcttctctgtacatgcgggtcacttcagttaagtattcagaagacttcaaaactccgtcgattttgaaagaatcgatgccggcgtccatcaggtcctctaattcatcaatcatgcacacatcgttcgggctcatgatgtgcgtgccgttttcatcttcaaaaatcgggtatttattgccccgttccttgtcatgcagaaacatccccgcttcttttttcttctgttcgatgtccatgactttaccctggtattcgaagtaatggcccactaaagaacgcttcgattggaacatgcaagtcatgccgtggatttgaatttcaatttccacttcagcgttttcttttatgtcaatgatgctgtccatatttaattccttagccagcactgcccgccgtgcgcctttgcgtccccagtaattgcaggaatagtagttggttcccgttgtttccgtgctccagtgcagtttaagctcgggagccgcttcacgcgccgccattaaaacggccggatcaccgaaaacagccgcatcaacgccggcctcctgcaaaaaggcaagatagccgttcagctcgtccactttttcgttgtgaaaaatagcattgacggcggcatacactttcgcgccttcctgatgagctgtctttacggcttcttttatatcttctcttgaaaattcaccggccagtctcaggccgtatctctgttctccgactaacagggccgttgcgcccgcttgaatgagcggaagaatatcctgtacagaagtcggagtcaccaaaagttcaggttttttcatgatccttcacctcttctttttactgatggcgatgccgtctccgaccggcagtatgaccgtttgatagtcaggccggtccatcagccattggttatattgatcaattttttcaacaagcttccgtcttcttttcggctcaatgtccgagtgattttgtgccaccagccctttaaacagaacattgtccgtaaaaatgactccatccggcgcaagcatcggttcatagagctcaaaaaagttcgtgtactggcctttggccgcgtcgataaaaatggcatcataaggagccgtgacacggacagactcagaaagttccagcgcatccccgtgcattacgtgaatccggttttccatttcaaagtcttttatattgttcacagcttcttcatagcgtttgtcgtcccgttcaatcgtgtaaatattcgcatccggaagctcaagcgccatccgtatggcggaatatccgattgccgcgccgatttccaaaatgtttttcgcctgttgaatcgacagcatttgaagcagcacttcaatgcccgcttcttccataatcggaacatggtgctcttttgcataggcttcaagctttttcactttatcaggccgaggcttcagcatcgcgtttatatactcgtttatttgttcataccgatcattcacggcaaacagcctccgttctaaaaaggagtgcccctgacgaatccgcggggacactctcttaagacacttctttatccataagtaaacaacccgatatattttatcataaaacctttcagaatggaataaaaggagagcttttgccctccttttattcgctgtcttttttggaaatatacttttccttcgctttattatggtcttttaatgttttggtgaaaacgacctcgccgtttgattttgcaaggaaataaagataatccgttttgtcagggcggagagccgcttcccatgatgaatcaccggcatttgcaattggtcccggcggcagccccttatgtttatacgtattaaacggggaatcaattttcaggtctttgtagtagacccggcttttatgcttaccggccgcatataataccgtcgggtcagtctgcagcggcattttttcttcgagcctattgtaaaaaacgctggcgattttgtgacggtcggctttagcggtggcttcttcttcaataagcgatgccatcgtcagcgcgttatggacggaaagtttctttttttccagttcagatttatacgtttcgatacgggtgtttgtttcctgaaccattgccgtcaaaatcgtgtcaagcgatgcatccggatcattaaacggatatgtggccggatacagatagccttcgagcggatgcttgagcttcttgtttgaaagcgcgtccgttatcgtatcaggaaactgttttttcagtttgccgatgaatgttttgtcatccagtttcgccatgatctcttcttttgaatatgatgtttcttttgcgatcgcatccgcaatctgtgtaagctgttttccttcaggaacggagatctgaaaggcatatcccgttgatcccgcggtcagttttttgataatcgcatccgcatccattcctttattcaggtggtaaaatcccgcctgaaacccggaagcgcctttatacttcacatacagctgaaatgcttttttgcttttgatgacatgctgatcctcaagaatttcagcgattgccgaaacggaagaaccgctcggaatattaatattgactgccgttttgctgcctttgtcaaccggggacagcagagattttccatagaaaaaagcaccgcaaatgatgataagcagagcgatcacggaggacagtattatcgtcgtttttttgtttttacgcggaaatgaatttttagtctgattgatattcatacaagtattttcctcccaacagctcttatactacatgattcatgtgcattcggcaatttattacaaaaaaaaagccgaagcgcatatgagctccggctttttccgttcattttattcttcgtcttcttccgctaaaaacgtattcagcgtttcttcgatcatttcccactcttcatcggtttcaatcggcatcagttcgccgtcttcaccgttttcgttcggttcgaaacttgaagcgtgaatttcgatttcatcatcgtcttgagcatcaatcggataataaagtacgtaagatttgttgaatgtgtcgttttcaaatgtgaacagtacttcgcaaagctgttcgttgccttgatcatcgacaattgtaatgtgtttttcgccgtgttccatttcttttcacctcttagtttaaactgtccagatatccttgaagtatcatgacagccgccattttatcaatgactttttttcgtttttgcctgctgacgtcagccgcgatcagcattttttcagccgccatcgtcgtcagacgctcgtcccatagcacaacagggacattgtacgctgtttcaagcagtttcgcaaatgtttggctggcttcgcctctcggaccgatcgtcccgttcatgtttttcggaaaaccgagcacgatcttctctacattatagtctttcatcagctcggataaacggtccagaccgtaatctccttcagcctcgtttatttttatcgtctcaatgccctgagcggtccagcccatttcatcgcttaaagctacgccgagtgttttcgttccaagatcaagtcccaatattctcatgaatgtatttacgcctctttatgctgttctagataggattttaccaattcctcgattaattcgtcacgttccagtttgcgaattaagttccgggcgtcgcgatgcctaggaatgtatgcaggatctccagacagcaagtatccgacaatctggttgataggattgtaccccttttcctgaagcgcatcatataccgtattcagcacttcttcgacgtttgtttcagcagaatcatcggagaaattaaatttcatcgttttatcaaacgagctcaccgttttgcacctctttcccaaattcgcaggcaaagttcagcctgaggtcctcatcttatcatcattctacactagttgaaaggattataaaacggattttatccaatcttccgcagatgccagcgcctcttccaatttttcaggctgctttccgccggcctgcgccatgtccggacggcctccgcctccgcctccgcagacttcagcagcttgtttgaccattttgccggcatgaaggcctttttcgatcaggtctttcgtcacgcctgctgaaaggttgactttctcgttttgcacggcgccgagaataatgaccgcagaaccgagcttcgctttcagatcatccaccatagtgcgaaggtggttcatgtctttcgcatttactttttcagccagcacttttacgccgccgatgtcttttactttagacaaaatggctccggcttccacattgccaagtttgctgagcaatgattcattttctctttgcgcttccttcagctctgcttgaagagactgaattcgcttcggtacgtctcttacgtttgatttcagctcgtccgcagcgtgctgcagaaggctgagctggctgttcatttcctgataagcgccttttcctgttacggcttcgattcttcgcgtccctgcgccgatccctgattcggatacgattttaaacaggccgatttctgccgtattcgtgacatggcatccgccgcaaagctcaaggctgtaatctccgacttgtacgacgcggacgatatcgccgtatttctcgccgaacagggccatcgcgcccatttctttcgcttcattgatcggtttcaaatcaatcgctaccggaatgctctcccagattttttcgttgacgattccttcaatgcgttcaagttcttctttcgtcacttgaccgaaatgagagaagtcaaaacgcaggcgattttcggtaacgagtgaacccgcttggttgacatgtgtgccgagaacgtctttcagcgcctggtgcagaaggtgggttgccgtatggtttttcaccacgccgcttctcatttgatcttcaacttcagccgtcacgcttgcgcctttttgaatcgtgccgctatccaccgtgccttcgtgtacatgctgaccgttcggagcttttttcacgtccttaatggttacgacagcctgctcgcttctcagcactcctctgtcaccgatctgtccgccgctttcagcatagaaaggcgttttgtcgagaaggatttggacggtatccccttcatgcgcctcgctgattaattgcccgtcatgaagaagctcgatcaccttcgcttcagcttttacggcactgtagccgacaaatgtgctttctgcggtaatgtcgcgcaatgcgccgccctgcacctgcatgcttcctacatcttggcgcgcatttctcgcccgttcacgctgtttttccatttcggcttcaaagcctttatggtcaactttcatttgctcatcttccgcgtattcctccgttaattcaaccgggaatccgtacgtatcgtacagtttgaatacgtcttttccggagatgatgccgctgcctttttccttctctttctttatcacgtcggataaaatggccagaccttcgtttaatgtttcgtggaagcgctcttcctccgttttgatgactttggctataaactcttgcttttctttcacctccggatagaaagcgtccataattcctgcaacagtcggtaccagctcgtacataaacggacggctgatcccgatggttttcgcgtatcgcactgcccggcgcaagaggcgtctcagtacatacccgcgcccttcatttgacggcagagctccgtcgcttaccgcaaatgcgaccgttctgatatgatcggcgatcactttaaaggccgtatccttcactgcatcctttccgtaagcatctccggaaatgcgctctgttgcttcaataatcggcataaacaaatcagtgtcaaagtttgtcgggacatcctgaatcacggagaccatccgttcaagccccatgcccgtatcaatgtttttcttcggaagcggtgtgtatgtgccgtccgggttgtggttgaactctgagaataccagattccatacttcaagataacgatcattttcgccgcccggatacaattcagaatctgacgggtcattgccgtatttctcgccgcggtcatagaaaatttccgtattcggtccgctcgggccttcgccgatatcccagaagttcccttccagacgaatgattctttcttccggaacgccgattttttccgcccatagcgtataagcttcttcatcctcagggtgaaccgttacagacagcagctccggatcaaagccgatccacttttcgctcgttaaaaactcccatgcccacgtgatggcttcttctttaaaataatcaccgatggaaaagtttccgagcatctcaaagaacgtgtggtggcgcgccgttttccccacattttcaatatcatttgttcggattgatttttgcgcgtttacaattctcggattctccggcacaacgcggccgtcaaagtattttttcagcgtcgcaacgccgctgttgatccataataaagacggatcttcatgcggaaccaatgaggcgctcggttcaacggcatggcctttttctttaaagaaatctaaaaacatttgacgcacttcagcagaagttaagtgtttcatctatattcctccttatcactacccgaaattctcttttgcgacagcaaaaaagctctctccctatgcaaaccatgcgttcacacagggacgagagctgtctcgcggtaccaccctgattacaggccgaaaaaggcctgtcacctttcatcccgtaacgcaggactgcggcagcctttaactgcactcaggattagcttccgccgatcttctgctgaagctcctttcagcgtatcggagcttctctcttaaacagggcttcggcgtactcatatccgtcactcgagattcgtatgtattctactcgaaattatagacaagcagaacccgaatgtcaatgttccgtcctgatccgcaaaaagtgtatggccgtcacttttaaaacggctgccgccggaacagcgagaatcatgccgggaatgcccgcgagctctcctccggcaaggagcgccagcatgatcacgacggggtgcattctgagactgcgcccgacaataagcgggctcaaaatgtttccttctataaattgcagaataaaaatggtgacgattacgatgatcacagctttagcagaaatcgccagcgaaaggagcagcgccggtacagcgccgataaacggaccgaaatacgggatgacattcgtaatcccgatggcaagacctaagatcagcggataaggaagcccgaacagccaaaatgaaacgccggctattaacccgagcaaaaaacaaacgagaagctgaccgcggatgtaatcaccgagagaatcgtccacatcccgcagaaattcactcccccttttcctccaggacttcggcgtcaaataccagactgtctttttcatgacgtctatatccttcaccatatagaacacgagaaaaggaatcgtcgccgcgatcaggatataatcaagcacgaaacggatgcttctgatcgtgctttcaatcgtgccggcaagaaacgtttctgtctgctgaatcattttgtccatccgatggtgcatgccgtcaggccaatgatccgtgtgattgtgcagatgcttcagtatactgttgtagtttttggcaagaccgggaatgctctcagacagatcctgcagctgttcaattaaaacaggaacccctttataaaccccccagccgattccgccgaaaaacaggcaataaatcagaagcaggcttaaagttctaggcatcccttttctatgaagccattcagtaatcggaagtaaaagataagcaataaatactgcgatgaatataggaataaagagagattttataacaagccaaatgggagaccataacatatcgagcatgcaaaagacatacactgttaacaaaacgagcagacatacagccgtccacattaagagctgcagcggtttttgaagcatgacgtttcacctcttgctttatcttttgacagaaagccggaattattcccgtttcataaactccgccttatgacgcagacctcttgacggaaataattatcagaaattacgaaataatctaaataatattcataaaaatctgtataaccatcgtaatgtgttaaaggatttcaaaaactgtccagtcaatatgactcatgtttttttaaggaggatggccatgatttcatttcaggatgtaaataagcactacggacatttccacgtgctgaaaaacattaatctgcacattaaaaaaggggaagtcgtcgttatcatcggaccttcaggatcgggaaaaagcacgcttctccgctgcattaatcagctggaaacagttgatggaggcgccttaacggtaaacggcgtctccatccatgacaagaaaacggatataaatcaggtccgccgcaatatcggcatggtgtttcagcattttcatctgtacccgcacaaaaccgttctgcaaaacatcatgctcgcaccgatcaaagtgctaaagcaatcaatagaagaagcaaaagaaacggccttatactatttgaaaaaagtcggtataccggaaaaagcggacgcttatccttcacagctttcgggcggccagcagcagcgtgtcgccatcgccagggggcttgcgatgaagcccgaaattatgctgtttgatgaacccacatccgcgcttgatccggaaatgatcggggaagtgctggatgtcatgaaaacactcgcaaaggaaggcatgaccatggcagtcgtcacacatgaaatgggattcgcaaaagaagtggcggaccgcatcgtgtttatcgacggcggagccatcttagaagaagctgcaccggctgaattttacgaaagcccccgtgaagagagggcgcgtttattcttaagccgtattttaaatcactgaaaagaaacggaggagcgcttatgtcacgcgtaacaaaatggttgtcattcggattaatatcactgctggccgtctttatgctggcagcctgcggagggaaagaaacgtccggggattcaaaaggaacgggaaaagacacgttagcctctattaaagacagagacaaaatcatcttcggcgtcaaaaccgacacgaggttattcgggctgaaaaacccaagctccggtgatattgaaggcttcgatattgatatctcaaaacagctcgcaaaagatattctgggggatgagaagaaagcggaatttaaagaagtgacgtcaaaaacgagaattccgatgctgcaaaacggcgatatcgatgccatcaccgccacgatgacgataacggatgagcggaaaaaagaagttgatttctcggatgtttattttgaagccgggcaatccctgctcgtcaaaaaaggaagcagcatcaaaagcaccgaagacctgggaaaaggctcaaaagtattggcggtaaaaggctctacttcctcacaaaacatcagagaaaaagcgcctgacgcctcagtgctggaatttgaaaattacgccgaagcgttcactgcgcttaaagcgggacagggagatgcgctcacaaccgataatgcgattttatacggcatggcagatgaaaataaacaatatcagctgacaggcgaaaccttcaccgatgaaccttacggaatcgccgtcaaaaaaggccaatccggactcatcaaggaaatcaacgcctctttgaaaaaaatgaaagccgacggcaggtacgaaaaaatctataaaaaatggattaaagaagaaccggcaaaatagaaaggaccgcgggatgagcagccatgctcatccccgttttataaggagtgacatagatgaacttttcaattttaacggaaaacttcgatatgtatatggacggtttcctgcacacattgcttgcgagcttcgtcgcgctggcaggcagttttgcgctgggcgttctgatcgcagtcatgagaatcacggctttcaaaccccttcaatggatcggcactgcgtatgtggaatttatccggaacatcccgcttctcctcatcacattcgttttttatttcggacttccgaacgccgggctgagactggacggctttcaggcgggaacgattgcgcttacgatttatacgtccgcctttatcgcagaagccatcagagccggaattcagactgtctccaaagggcagatggaagcggccagatcgtcaggcttcacctacagtcaggcgatgagatacgtcattcttcctcaggccgtaaaaatcgtgattcccccgctcggaaaccaatttctcaaccttgtcaaaaactcatcaatactcggagtggtggcgggactcgatttgatgtatcaggcggatctcgtttcctcaagcactcttgtcgtgtttgatgtctatattttcgtcgcgcttttttatttggtattaacgatcccgctcagcatcggggttcactatttggaaagacgtctcggaaagagttattagaaaaggagagtgaaaaacatggattttagcggcgcctatacacctgaccatctgctgtttttatgggacggctttttggtcacactttatgttgcgctgatctccattgtcctgagttttattttcgggcttgccgccggcactttgcgctatgcgaaaattcctatcgtttcgggcagtatagcggccattgtggaaaccatccgcaacctgccgctgttattaatcattttctttacgttttttgcccttccggaaatcgggatcaaactggaaattaccgcggccgccattacggcgcttacgatttttgaatcggccatgctgtcagaaatcatcagaagcggtttgcaatccgttgacaaaggacagattgaagcggcgcgttcttcaggactgacgtacacgcagactctttttctcgtcgtcatgccgcaggcgctcaggcgtatggttcctccgattgtgagccagtttatttctttattaaaggatacgtcacttgcggtcgtcatcgctctgcccgaactgattcataacgcgcagattttaaacggacaaagcgctgacggagggtattttttcccgatctttctgctggcggccctgatgtatttcgcggtcaattacagcctgtctctcgcggccagacggctggaagcgagacaaacgtaaaaaggatacttccggagaagtatccttttttctgcttaaaacattttcatgactcgtcttctcatccgtttcataccttttttattcagcatatcggactgagaagccatacgatacataacggctccagctcctaaagccaacagagaggtcattgttctgcccatcgcgcgtatctcctttcaactttaaaaattgatactgcgttcgtcttcagaaaacaaatcatcaagactgcttaatgtaccgtcttcctctacttgatgtgttgcaattttgcctttggccaccgtcagctcaatgaagcagccccagcaatagtattggtttacgccgattttgccgatatctttacttttgcagttcggacatacaagcacagactacacctcttatccgttcaggacgatgccttctttccccgcttcaataagcgtatcggcggcgcggcgcacttggcgtctgccagccagatctgaaaagaagccgtccgagagttcatatgctacgattatgcccttgtccaaacaaaagtatacatcttccagtaaaccgaacatttcaccatcaggcgatttcaccggctgcatcttaatctgttcaaaggtgaaacagctcttcggcaaaggctgcaaatgagcatgaccggaagctacggcttcttgttccatctcttttatatcacttgcctctaaaaaaagatggcggttgtgaaacaggcgtttctgctccagaacgaaaccgagaaaccggccgtccagagagaaacatacatccgatatcatcccgagactgcgcccgttttcgtcatatactgttcgtccttcagctgcatggcatgttctcaaagtgtgatcaaccaccttttgttgaacacgtataggttttgccaagaagccgggcagcatactttgaaatgacttccacaggcgaaaacccggcgcatgtttatgctccgggttttatttacgctttttcttccataaagtcaaacggcgtgatgccttccattccgatgttcgcatcatgtacactgaacggcagctctttttgcagggcggccagttctgcatccatctcttcagtctgctctgtgagcctgtttttaagcgacgtctgtctgacggtggcatcattgtttttgacgccccattcaagcgcttcttcttctccgcaaagaatcagaaattttttcgctcttgttatggcggtataaagcagatttctcctgagcattcgatagtagcctttgacgacaggcaggacgacaatagggaattcgcttccctgcgacttatgaatggaacagcagtaagcgtgggtaaactggctgaaatcctttttcgtaaaggtgatttcgttgccgtcaaacgagacgacgaccatgtcttctttttccgtattttctttggcataaaaaatggacacgatttcgccgatatcgccgttaaacacattgttttccggctggttgacaagctgtaatattttatcgcccgtcctgtagacgacatcaccgaatttcagctcccgccttttttctttcggcggattcatgatgtcttgaagaagcatattcagctcgttaattcccgcttttcccctgtacatcggggcaagcacttgaatatccctggaggtataccccttttttaacgcgttcgaaacgacctgatccacgacttctttaatctgtgaagaattacagcggataaatgagcggtcctttgtcggcgcggtcagcccctttggaagcagtccttttttcatatcatgcgcaagttccacaatggatgatccttcagcctgacggtaaatatctgtcaggcgcacggtcggcagcacctcagaagccaaaaggtctctgagcacctgccccggtccgactgaaggaagctggtcttcatcaccgacgacaatgagctgaatgtgcttaggaagcgccttaaacaaatggctggcgagccagatatcgagcatactcgcttcgtctataataatcagtttcccttcaatcggctgatcttcattgtaggtaaagccttcagcgccattccagccgagcagcctgtgaatcgtaacagccggcagacccgtagattcgctcatccgttttgcggctcttcccgtcggcgcggcaagcagcagcggaaacgcctcgtcttttttataatcaccggggtcaagcgatactccgtgcagttcactgtataattccacgattcctttaataacggtcgttttccccgtcccgggtcctccggtcaataaaagcatcggtgaagacagcgctttttgaatggcatccttttggcttggtgcgtattgaacattcatccgttcttccagttcaccgagtgcaagcagaaattccgattcaggaaattgatcggcatactccgtctgagccgcaatgtcgagcacgcgttttgcgacattttgttcggcgtaaaacaaggacggaaaatagcagcgctctccttcaatgacgatatccttactctccccgagggcgatgatgccgtcagccgcatccatttctgtgacgcggccgccttcagctgactgattcaggagcgtttgcgtattgataatcagctgctttgtctctatgtacgtatggccttctgaaagacaggtcgattcaatcgtatataagattgccgctttgatccgctccgggtggtttcctgacagacccatttttccgcccagctcgtcagctttcacaaagccgatgccttcaacgtcttttacaagctgataaggattttcctgaattttctccagggtttccgtttcgtaggcctgatatattttcattgatagctggggcccgaaaccgtattggttcagagagatcataatctgctccagcccctgatgccgctgcagctctccggcaagcttatccgctttctttttcgacattttcggcacatcgtaaagcaccgacgcatccgtcagaattttattgagcgcgccgtctccgagctttttgacgatttcttccgccgttttttttccgattccttcaaacagatcacttgataagtagtgaatgatcccttcttttgtggtcggaatttcttttttaaagtgttcagcctgaaattgcaggccgaacttaggatgcgtggcggtttttccataaaatgtgtaggtctcatcttcttgcagcagagggaagtagcccgttacggatacgaccttgtcttcgatcgcctcagacgtttctgcaactttgactttcagcactgtatacaggttggtgtcattatgataaatgaccgtatgaatgatgccttttacatacggctgttcttcgatgttcagctgatccacgagccttccctccttttgttacgactgggtgataagctgtttcgcatgaagcgcaagcatatgatcaggctgtatgccgattgcgccttccagcatctcaagcgccttttcacgattttctttgtacgcgtaagcgactccggcattataaaatgcgtccgcgtggcttgggtcctgctcgatcaccgtctcaaactgcgtcagagcttcatccagcatttcttcatttgcgagacacattccgaactggaagcgtgcttccgtgtcattttcgtttaattcaacggcacgctgcaaatacggcagtgcaagcttcggccgctctaatttaacgagaacggtccccagcatataaaacaaatctccgttttccattccggagcgaagcgctttttcaaacatatccttcgcttcggaaaacgattctttcatcacatatacgtttcccgcaccgtaataagcggctgccgccgaattgtccaattcgagcgctctgttatagaatgcaagcgcccgttcgagttcgttcacagaagaaagcagatttgcgaagttgatatacggcaccggatcttgcccgttttcctcaatcgctttcgtaaaagcctctgccgctttttcaaaatcgccctcctgcatggcgtcaatcccgattttattataatccatttttaacttcctttcgctaaaaaaccccaacatgcgagttgaggttttttacatgtgttatacgtaccacagttttgttccgtctttataaacgtcatctatcgttccgccgccgaggcactcttctccgtcataaaaaacgacggcttgtcccggcgtaacggcgcgtacctgcccgtcaaaaatgacttccgcttcatcatcacccgtcattttcaccgttactttgtgatcttcctgacggtagcggaatttcgccgtgcatgtcatttcgccgccgtccatcagaccgggacgcgtccagctgacatttgtcgccgtgatcttatcggaatacagaagcggattatggaatccttgatcaacatacagaatgtttttttcaagatctttaccgacggcgaaccacggctcgccgcttccgccgattccaagaccgtggcgctgtccgattgtataatacatcagaccgtcatgacgcccttttacttctccgtccattgtcatcatatcgcccggctgagcggggagatattggctgagaaacgttttaaagttgcgttcgccgataaagcagattcccgtgctgtcttttttcgcagctgtcgcaagttccgcttctttggcgatttcccgcacgcggcttttttgcagatcaccgatcgggaacatgactttgctgagctgttcctgattgagctgattcagaaaataagtctggtccttgttttcatccaggccgcggagcatgcgcactgtacctgcgcttctgtccacgcgggcgtaatggcccgtcgcaagataatccgcgccgagtgacagagcatgatccaagaaagccttaaacttaatttctttattgcacatgacatccggattgggggttcttccggctttatattcatcaaggaaatattgaaataccttttcccaatattgcttttcaaaattgacggcataatacggaattccgatctggttgcagacccggatgacgtcttcataatcttccgtcgccgtgcaaaaaccgttttcgtccgtatcatcccagtttttcataaagattccgattacatcgtagccctgctccttcagcagaagggccgccacggaagagtccacgccgccggacatgccgactacgactcttgtatcctccggccgtttttccatttgcattcactccattaaaaacgtaagtccgccgttttaagcaagccgtttaacgacggcggcaagcttttcggcggctgtttcgatttgttccgccgtattgccgaggccgaagctgagacggattgacgaagtcagcctgccgctctcacttccgaacatggccgtaagcacatgggacggaagaacggatcccgctgtacaagcagatccgctggagacggcaatgccttccatgtcaagattgaccagcagcgcttccaccggcacaccgggaaagtaaaggtttaaaatatgaggcaggcatttctcggcatctccgttcacctccgctgttacgccggatttttccagcgtgctcatgataatgttcttaaactccttatacttcgctgttttctcttccctctcacggtttgaaaggacgaccgcttcttttaagccggcgatgcccggtacattttccgtccccgcgcggcgctttcgttcctgctctcccccgagaagaatcggtgacagcttcacctcttgatttacatataaaaagcctgtccctttaggcccgttaagcttgtgacctgaaacagacagcatgtcaattctgctttttttcacgtcaatcgacatataaccgaatgcctggacggcatctgtgtgaaaataggcctgatgcccgcttaacagctctccgatttcgtcaatcggctgaatggttccgacttcgttattgccatacatgacggtaacaaggattgtatcatcacggagcgcttctttcacctgatttgcactgatccgtcctgaagggccggggatgaggtatgtcacctcaaagccgtcttcttccagcttttcgcaggcgtgcaacacagcatgatgctcaacagcggtcgtaatgatatgctttccttcattcttccgggcggcagccgttccgaaaatcgctaaattatcagcctccgtgccgccgcttgtaaaaataatttcctgttctttcgcactgatttcgcgcgcgatgtccgctctcgcttcatcgacccatttccgggattctctcccgaatgaatgaatgcttgacgggttgccgaaactgccgaagaaatggggcttcatctcttcgagcacacgctcatccatcggggaagtcgcggcatgatctaaataaatccgttccattgtctgtacacctctggtttaaatatagaacatataagcttcctgctcgccgtccgtgtagctcgcaaggtcttctaacgtcgtgctgtccagcacgtcttttacagcgtcgcggatgcggatccataactcccgcttggcaggctcttcatcctcaagcacttctaccgggctgatcggcccttccagcactctgataatatctccggccgttatctcttcaggctggcccccgagcacgtaacccccgtaagcgcctctgatgctttttacgagtccggcgtttctgagcggtgatacaagctgttccaagtaatgctcagaaaggctgtttgtttgggcgatgcttttgagcgacgtcggaccgtctccgtgctttttcgccaattcaatcataatggtgagcccgtatcttccctttgtcgatattttcaatatgaacaccccagtcaattctaattgttaatttatacaagtaaatggatatgaataatctgtttagtatcttatagaccaactgttattataacataacttatcctaattttcattgaaacacggggcccgccgcaattcgcttttctaatcgtccgttttccgttaccctgtatatgtaaggagagatgttcatgaaaccactggcgtatcggatgcggcctgccaatattgaagacattatcggccaggaacatttggtcaaagaagataaaatcatcggcagaatggtgcgtgcaaagcacttatcatccatgatcctgtacggaccgccgggcatcggaaaaacatccatcgccacagcgatcgcaggatcgacaagcatcgcattcaggaaattgaatgccgtcattcataataaaaaagacatggagattgtcgtacaggaagcgaaaatgtcaggccaggtcattttaatccttgacgaagtgcacaggcttgataagggaaagcaggattttctgctgccctatttagaaaacggcatgattattttaatcggcgcgacgaccgccaacccttatcatgccattaacccggccatcagaagccgtacccagatatttgagcttgaaccgttaacacccgatctgatcaagcaggcattgaaaagagcgctcacagatgaacaccggggactcggttcttacagcgtttcggtggacgacgacgcgatggatcatttcgcacaagggtgcgggggagacgtccgctccgctttgaacgcactggagcttgccgtgctctccacaaaggaatcaagcgacggcacggtccggattacacgggaaacggcggaagaatgtctgcagaaaaaaagctatactcatgataaaaacggcgatgcgcattatgacgtcttatccgccttccaaaaatcgatccgaggctcggacgcaaacgccgcccttcattatctggcccgtctgatcgaagccggagaccttgaaagcatatcaagaaggcttctcgtgatcgcctatgaagatatcggcctcgcaagcccgcaggcaggcccccgggtgctgagcgcgattcagaccgcagaacggatcggctttccggaagcgagaattccgctggccaatgcggtaatcgaattatgcctctcgccaaaatcaaactccgccatctcagccgttgatgaggcgctcaaagacatcagaacgggtaaaatcggcgatgtgccgaaacatctaaaagacgcccactataaaggggcccaagagctcggacgcgggatcggctatcaatatcctcacgatttcgaaaacggatgggtcgaacagcaatatttgcccgatccgttaaaaaacaagcaatactataaaccgaaacaaacggggaaatttgaagccgccataaagcaagtgtatgaaaaactgatgaagcagaaaaaataaccggacaaggacatcctatgtgttcttgtcttttttgataccggccaaaatctttcgtgtaaacggcggattcaaataaaaaacagcctttcctgaagaaggctgtttttctttttatttatctttaacccgtttaatgtcgatgtcctttaagagctccatgacaacatgtccgcccataatcaggccggccactgacggaacccaggcgttggaagacggcggcatttgcgctttgcggattttcgcttcatcattcccgacttcttttctgacgtcttcacggatgacgatcgggctttcatcagaaaaaatgacctgtacgccttttttaatgccctctttgcgaagccttatgcggacgactttggcaatcggatcggtatgggtttttgaaatatcagcaatctgaaagcgtgtcgggtctgttttattcgccgctcccatgcttgaaatcagcggaacattccgtttcagacattctttcatcagatgaattttataatgaatcgtatccgacgcgtcaatgacgtaatcaagcggatactcaaagaactgctcatatgtctcttctgtataaaacatttttaaggcaacgacatcgcaatccggattaatatccgcgatccgcgctttcatcaagtctgttttcggctgtcccaccgtcgacaagagcgcatgcagctggcggtttacgtttgtaatgtcaacatcatctttatcgacaagcacgatccgccccactccggacctcgccaatgcttcggctgcgaatgaaccgactccgccgacgccgagaacggccaccgtgctgttttttaacgtgtccagcccttcttttccaatcgctagctcatttctggaaaactgatgtaacaagaacctcactccacattctggttttataaactcggcttgtcaaaaagccgctggttttagcgcacaaaaaataaagtcccaattgtgccgttgcagctttccttcgttttgaacccgctctcagcaggtgggtgcccttttttaaatcttgtaagtcctcttaacgaatgaaaagaggcatgtacgccatttaaaaatgcgggctcccaaatcaaaaaaatgttcggtcaaaactaggtgtacaactaacacatcaggactttatttaacttgtcaaaatcatatcacagcagattttgattttcaagaaacaaactgctgatctttactgtttcacttttcttttgacagaaaggtgaagttcttcaagctgggcctcgctcacttcgccgggcgcttccgtaagaaggcagcttgcgcttgccgttttcgggaaagcgatcgtatctcttaagtttgtgcggcctgcaagaagcataaccaaacggtctaagccgagcgcgattccgccgtgcggaggggcgccgtattcaaaggcttcaagaaggtatccgaattcctcctccgcttcttcttttgtaaagccgagaagcccgaacattttttcctgaacgtctttttcaaaaatacggattgagcctccgccgagttcatagccgtttaagacaaggtcataagcctgcgctttcatatcttcaggcgccgtttcaatcaggtcaagatcttcacggacaggcattgtaaacgggtggtgagccgcatagaaacggccttcttcctcgtcatgctccagtaacggccagtccacaacccacaggaagttgaagaggctttcgtcaatcaggccgcgttctttgccgagctttaagcgaagcgcgccgagggattgagccacaacctcaaacttatcagcgccgaacaggagcagatcgccttcagaagcatcaagcgcttcagccagttttgcctgcttctcttcatcaaagaatttcgcaatcgggccttttacgccgtcagcttcaactttcacccaagcgagacctttcgcgccgtaatttccggcaaaaacgccgagcgcatcgatatcttttctggaatagtcgccggcagcgcctttgacattgatcgcttttacaacaccgccgtttgccacggctgatgagaacaccttaaattcagtatctttcactatgtctgacacgtccgtcagcagcatgccgaagcgggtatcgggtttgtcggaaccgtagctgttcatcgcttcttcatatgtcattcgcggaagcggcagcggtacttcaacaccttttgtttcaagcatgactttcgccatcatctcttccgccagagccatgatgtcctcttgactcataaaggacatttcgatatcaatctgcgtaaattccggctggcggtcggcacgcaagtcttcatcgcggaagcagcgggccacttgataataccgttcaaaacccgacaccatcagaagctgtttaaaaatctgcggcgattgcggaagggcgtaaaattctccttcatgcacccggctcggcactaagtaatcacgggcgccttcgggagagctttttgttaaaatcggtgtttcaatatcaagaaatccgttttcatccaagaaatggcggatggattttgtgacttgatggcgcatttgcaatgtttgaaacatcgcggggcggcgcaaatccaaatagcggtgttttaaccggacgtcttcagaaacgtcagccgcctggtcactgatcggaaacggaggcgttttcgccgtactgagcaccgtcaccgcttcagctttgatttcaattttaccggttttcaggttgggattcaccgtgccttcttcacgggcagaaaccgtgccttcgatatcaagcacatattcgtttctgattgcttccgctgcggcaagggcttccttcgatacgtcagggttgaacacgacttgcacaatacccgagcggtcacgcaaatcaatgaaaatcaagccgccgagatcgcgccgcttctgcacccaccctttcagtttgacggtttcgccaatcgctttttcagttatctcgccacaataatatgttcttccaaacatagcgttcctctccttcactgcttttgatctgcctttaacacttgtatcagctcgtctaacaccacttcacgctgctctcctgtttccgcatcttttacattgattttattctgggcaagctcatcttcccctaaaatcgcaataaaacgtgcgccgagacggtcagccgttttgaattggcccttcatctttttattttcataatcgatttcacttgagatgcccgcttctctcagtttgtacacgagggaaacggaataatccttcgctttttctccgagcgtcacgatgtagcagtcaatcccctgattgacgggaagctctgttttctcagcgtcaatggctgccagcagacgttcgatgctcatcgcaaatccgatacccggcgcttcaggtccgccgatctgttcaacaagcccgtcatagcggcccccgccggcaagtgttgtaatcgctccgaatccttcggcattgctcataatttcaaaagcggtatggttataataatcaagccctctgacaaggttcggatctatttcgaacgggatgccgagatcgtttaagtattgttttactttctcaaaataagcggctgattcttcatttaagtaatcaagaatggacggagccgttttcatcagttcatgctctctgtctttcttgcagtcaagaattctgagcgggttcgtgtgcagacgcgactggcagtccgagcaaaattctccgatgcgcggttcaaaatgtttgacgagcgcttcccgataggatttgcggctctcctggtcaccaaggctgttcagcacaagcttgacatgtttcaaaccggctttacagtaaatactcatcgcaagcgcaatgacttctgcatccacggccggatctttggagccgatcgcttcaattccgaattgatagaattggcggaaacgccccgtctgcggacgttcgtaacggaacatcggtccgacataataaagcttcgtcggctgcaccgggttcgcaaataatttattttcattgaacgcgcggactgcggcagccgttccttccggccgaagcgtcaggcttctccctttacggtcttcaaacgtgtacatttctttctgcacgatatctgtagactcaccgacgcctcttgcgaacaattccgtatgttcgaagatcggcgtgcggatttctttatattgataagtgcggcacgtctccctcataatttgttcgacgaactgccatctgtctgattcacccggcagtatgtcctgtgtgcctcttggaatgtgatatgccatgttacaggcctccttaatgtctttcttcaaataaaaaaactcccgctcctactatacatgtatagtagggacgagagttatacccgtggtgccaccctagttggaatgccgaagcatccccgctctgacctttaacgcaggttcacgtccgctgcctaatgacttgctaaagcgttcagcagggaacctccggagtgttgtttcgagaaagatgcagtgcggatccgctttcagcccgggacggttcctctcttctccatgcattctgacctactcttctccattatcggttcaaaatcgttatcatgacttatgtacatcaatttctattataataatgggattgcactcccctgtcaagttttattccgtctgtttttccttgcgaccgcttctttcgataagagaccgaactccgtcgccgtctcttcaagaaaacccgtcttttctctatcgctctgatcactgaaatgcagatttccttccgcatcgtgcagcgcgcgtcccatttttggttgatatttcatgatttgcacaccttttcgctgtatttatgactagtataaacaaaccattttatttttatttaacattcagcaaggaaaatacgatattatacaagaatgtattttagttagttcagaaaggaggacagccatgaagaagagaactcttgctcttattttatgcggcgtcatcatcacagcgcttcttccgtcattccacaccgcaatcgccgcagagggagaagcggtcatcgcgacagacaagatcaatgtcagaggcggtcccggcctgagctatggaattaaggctgaagtaaaaaaaggggaaagatacccgatcgctaaagaagagggagactgggtgcagcttcagctgagccccggtaaaaccggatgggtcgtttcctggctgatatcaaaaacagccgggggagcagacaattcatccgcaacaagcggaacggtcacttcgaccgatcctgacctccgcatcagaaaaggcccggggacatcatatgaagtcatcggcaaacttccgcaaggtgcacatgcatccgtgctggacaagaacagcggatgggtgaacatttcttatcaaggcacaaccggatgggtttcttccgaatacgtcaccgcggacagcggcggatcggatacgaaagcaacttcggcccgaagcgggtcaaaaagcggaacggtcggcgtttcttcattgaatgtcagaagtgcagcgtcacatgattcagcgattatgactaaattatcacgcggaacaaaggtttccattttaagtgaagaccacggctggctgaaaattgaagcaaacgggcaaaaaggctgggcagcaagccactacatcataaaggattctgactcatcggacagcgcatccagctcgggagacggttctgcgggctcaggctcctcgaaaaaagcgtatattgtttacggcggcaccaacttaaggagctcggcctcgacttccgcttctatcgtaaaaagagcagataaaggcgcagcctacccgattgtcggctcaagcggcaaatggtatgaagtccggcttgaaaacggacaaactgcatacgtggcaaactgggtcgtacaaacgtcaaaaagcggtgaggtaacaggcgaagcaccttctcccaacacgtcaggcggcagcggctcacttaaaaacaaaacgattgtcgttgatcccggacacggaggaaaagacagcggaacgatcggctactccggaaagtttgaaaaaaacgtaaccattaaaaccgctaagctgctggcccaaaaattgcgggcatccggtgcaaacgtgtatatcaccagacaggatgatacttttatcagcctgcaggccagggtttcaacctctcattaccggaatgcggatgcctttatcagcattcactatgacagctatgccgatacgtcaacgcggggaagcacggcttattattacagtccgtctaaggatcgccagcttgcctcagacgtccattctgaagtagtgaagcgttcccctatcccggatcgcggcgttctgtttggcgattattacgtcctgagggaaaataaacggcctgccatgctgtatgagctcggctatctcagccaaccgcaagaagaaacaatcatacatagcggctcttatcaggaaaaagtgacagacggaattgaaagcggattggaacattattttcaatcataaaaaaagctgccgaacggcagcttttttattgtttagaatccataatcaatgtaatcggcccggaattcgtcagctgaacatccatcatggctccgaatattccggtttccactttgactcctttttcccgaaggagctcgttccacttttcataaaggagcactgcctgatccggtttagccgcattcataaaattcgggcgtctccctttcttcgtttcgccgtaaagcgtaaactgggaaacggataaaatctccccgcccgtatccaaaagcgataaattcatcttgccgctttcatcatcaaaaatccggagattcacgattttatccgccaagtaaacggcatcttcttctgtatcttcatgagtgatgccgacaagcgccataatgccgggtccgatccggccggcgacagcgccgtcaaccgtcacacttgcttctgttacacgctgaacaactaatttcatagcaagctccttttagttcattacccgccggactgaatagatgtctctgatctgcttaatccgctcgaccactttatgcagatggttgatgttttgaataaaaatcgccatatgaatcgtagcgactttattgcggtcggatttgccggagacagaggagatgttggttttcgtctcatttacggcttggagcacctcatttaaaagcccgagacggtcataccccaaaatctcaatctcaacgttatattctttgcgtctttgaacctgtgattcatgctcccattcaacagggatcagacgttcctgcgcttcattcgttttgacgttcggacagtcatcccggtgaacggatacaccgcggccttttgtaataaaaccgacaatatggtcgccaggcaccgggttgcagcatttcgacaagcggacgagaaggttgtcaatgccttttacgcgcacacccgcttcccgttttctcccttgcggataatgtttcggctctgaagtgacttcctgaacgattttttcctgctcttcctgatcacgcagcttccgttctttttcggtgagcctgttggccacctgaagagcggtaatgccgttatacccgaccgccgcatacatatcctcttcattagagaaattgaacttgtcggcaactttttgaagattttcgagtgttaaaacatctttcacttcaaaatcaagatttttaatttctttctcgacaagctcacggcctttttcgacgttttcttcacggcgctgtttcttaaagaattggcggattttgtgtttcgcctgggacgtctgcgccagtttgacccagtcttgactcggaccgtatgaatgcttggacgtcagaatctcgacgatgtcgcccgtccggagcttatggtcaagcgtcaccatttttccgttcactttcgccccgattgttttgttgccgatctccgagtggatcctgtaggaaaaatcaatcggcacagagcctgacggcagttcaatgacatcgccttttggcgtaaatacgtataccatgtcagaaaacagatcgattttcagcgattccataaattcttccgcatcggtagactcgttttgaaattccagaatttcacggaaccaggacagttttttctcaaatgtcgcttcttcgtttgcagccttgccttctttatatgcccagtgtgcagccaccccgtattcagcgatctcatgcatctcaaacgttctgatctgcacttccagcggatcgcctttaggcccgattacggtcgtatgcagcgactgatacatattcggcttaggcatcgcaatataatctttgaatctgcccggcatcggcttccagcacgtatgaataatgccgagtacggcgtagcagtctttaatgcttccgacaagaatacggacggcgagcagatcatatatttcattgaactgtttattttgcagcgccatcttgcggtaaatgctgtagatgtgcttcggacgtcctgaaaagtccgctttgatattcacttcttcgacgcgttttttcacttcattgacaacctcttcgacataaagttcgcgttccgcgcgctttttcttcatgaggttgacgattctgtaatattgctgaggattcaaataacggagagcggtgtcttccagctcccatttgattttagaaatcccgagccgatgggccagcggagcgaaaatttccagcgtctcatttgaaattctccgctgcttttcctgcggaagatgctttaacgtccgcatattgtgaaggcgatccgccagcttgatcaatatgactctgatatcctgagccatagcgacaaacatttttcgatggttttccgcctgctgctcctcttgagatttatacttaattttaccgagcttcgtcacgccgtcgacaagcatcgccacttcttcagaaaatgcttccttcaggtcgtcgagggtgacatccgtgtcctctaccacgtcatgcagaaatccgcccgcaattgtggaagggtccatttccagatcgacgaggatccccgccacctgaatcggatgaatgatgtacggctcacctgatttgcggtactgttcgcgatgcgcgttttgcgcatacaggtaagctttctcaacaaacgcaatctgctcctccggcagataagtgcgcgctttatctattacttgctcggcagtcaatacttgttcgttcgccatggaatcaccttttttaaatgtaaactgtattagtttattatcaagaaaaaaacgagagatgtaaagggcagaagttcaaaacacctaaagaatctgtcaggatgatgaaataataggaaaaaagcaccctgacacgagtgcttttttccatatgcggttaatatttcattaatgttaaaatatcgtaatcgtcaagcttgtctctgccatcaaggtaagaaagctcgattaagaacgcaataccggctacgacgccgcccagttcttcgactagcttaatcgttgcttcgatcgtgccgcctgttgcaagcaagtcatcagtaatcagcacgcgctgtcccggcagaatcgcatctttatgaattgtcagtacgtcttttccgtactccaaaccgtaatcgactttaatgacctcacgcggaagttttccttctttccgaaccggcgcaaagccgactccgagagcgtatgcaaccggacagccgataataaagccgcgcgcttcaggcccgacaactaaatcaatttctttttcttttgcatattcaacaatctggtcagtggcgtaacggtatacgtcgcctttgtccatcaatgtcgtaatatctttaaattgtacgccttctttcgggtaatcgggcacaattgttacgtattttttaagatccatctgttctatgtcctcctcgtactttcataagcttctgaaccttggttcatcagcttattcagccattccttcagctcatgggctgcggaataattgagcttctggtctaattccatcagctgctgttttacctgataggtttgcgaatctgccaggtcgcgttttttcgcgccgctcacgacagacagcacaccatcttctattttaacaaaaccgagatcaaaaaacacctttgtcatgaaattgattgtgtcaattgaccatcctctgtgtctcgcaagctctgaaccatgcttgccgaagtcaaaagcgccccttttcaagagaaatgcgtaaaaccacttgaaatcattccgcgatggaaatgaggacaggaaatgttcttcatgattgataaaaacaaaataaatccgttccggcttctttccgtcaagcaaatgctgcaggcgatccgctgacggcggcacatccagaaaaacggcatattttccgtcaagctggagagctttcgcctcggattccgatgtgatcccggcaaactcgcccgacagctctttttcacggagcttctgagcggttttttcgttaaagctgatgagcacccgtttttccttcggcagcgcggtgaccgtgtcttcccacgtccgcttgcccctgatatcaaaaagctgccattccggcaccgcagcatctttaatcatcagctggggcttctttctgttgttccattcattaatggacatttcgccgacaatggaaatcgttgatccggggacaactccggcttcaagctctcctttgttaaagccgacgcagtcaaggacggcggaatcacttttcaccgtcattttcacgtggtttttattcgctccgatcaggcgcacatcatcaagcaccgcatttttcaccatcacatgcggtttagggttaagcatgccgaacggcgacagcatattcaattctgtaatgctttcaacggttatgtcttcaacgccgcagacaagatcaacctcctgaacgggaataaaatcctcttccgtaagggtttcttcagccatttgattcagcctgtcccttaattccgccacatcttcagccttcaacgtcattcctgccgccatcggatgcccgccaaaatgaggaagaatgtctctgcactgtgaaaggctcgtaaacaggttgaagcctctgatgcttcgcgccgaccctttagcgattccctgctcctcatctatcccaagcacaacagcgggccggtaaaaacgttcagccagcttcgatgcgacaataccgacgactcccggattccagccggcttttgccactacaatggcagacgggtttccgccttgctgctgaaccatttcaacagcctcttcggtcatggttttcaccattttctgccgctctttattcagccggtcaatatccgaagccagttcctccgcttcaaactgatcttcagtcatcagcaggtgcacggcgggatcggcctgttctattcttccgacggcattgagcctcggcgcgacctgaaatccgatcgtttcctcatcagcttgtccgatatctccgccggaaagcttaatcagagctttgaggcccggccgatttgtcgtcctaagcctttcgattccgagtgacgcaattaatctgttttcatcatgaagaggcaccagatctgcaaccgtaccgattgccgccaagtccagcatagcttccggcaaagaacccgtaagcgcgtgggcaagcttaaacgccacaccgacgccggccaattctttaaacggatagccgcatcccggctgcttcgggtggatgatcgcaaatacgtcaggaagctcgggtcccggctcatggtggtcggtaataatgacgtctaagcccagctcttttgcgacttcagcttcatggacggcggcgattcccgtatccactgtaatgattagcgaaaatccccgctcttttatggagcggaaagcttgttcattcgggccgtagccttctgtgaaacggtcgggaatataaaagtcaacgtccgccgacagctgtctgagtgccgtcagcatcaccgacgtgcttgtaacgccgtctgcatcgtaatctccgtaaatcataatcggttccccttgagaaaccgccagttttatccgatcaactgcttcccgcattccctttaattcatacgggtcataaaagtctgcatcctttgtatgtaaaaacagccttgcgctttcggcagtatcaaaacctctttttacaagcagtgatgccacaagaggtgttatgtccaattgttctgtgagtgatttgactttttcctgatccggctgctggatttcccagcgcatttttgacgctaacataaattcacccctcaaccaccctattatactagagcggactgaggggtttcaaatgttattctgatccttttttctcttcaagcatttcttccggcggcgcggctgttttttggccgtccgaatcagccgtcaattcacctgcggatctgttttctttccgcagcattttaatttcgcgcttcagtttcatcacttgaaagataccggctgaaaacacgatcagcgctcccattaacacagagcctaaaatgactaaaatcagcggccattcagcggttccgaacagataatcaacctcaaccgcccgcacgttaatgacagcaaagatggcgacaatcaaagtaaatagtaaagcgaatataatagtccattgtttattcatgcgtctgcccccaattgttcattcttatcttttcccccattttcccgggagtaaaccccggtctcagaaaatccgggccgttaactgctcgcggatcagctttttcagtccgcttctttctcccgatataacgagggtgtcccctgcttcaattacggtatcaatgccggggctcagctgtttttgccggtttttctttacgatcgcaataatctggacgttgtaatgtttcttgatctccaaatctccgattgtacggctgacagccggtgcatgagattcggctttaaaccactcaatgacgaggtcatcaagcgcaacttccacagattccagcgctttcggcttatacgtcatcccgcctaaaatagcggaaatctgtctcgcctcttcgtcgttaaattcaacggatgccaagcattcgtcatgatcattctcatcgaagtaatagagctcttttctgccgtcatcatgaagaataatactgattttatcgtgatttttcgtaatgacttctactttctggccgatgcccggaagctccgactcacgaacgttcataagaaccctcctacatgtttttacaatgatgattgattatgtaagcgtatgtcattatagcaaatgcaggttttaagttcaatgcggcctgaaaaaacaggctgccttctgcaagacagcctgttcccattttactcttcgattgattttttccctttaaattctttacctttccatacaagccacagctgcgcggcgatgtaaagagaggaataaacgcccgtcaataaaccgaccaataaagcgacggagaagtttgtaattgacgatgagcccaaaatgagcagcacgacgacaacaatcacaacggtcaagaccgtattgatcgaacgtgtaaaggtttgctgcaagctcagattcacgatatgttccagatcggcaaatgacttcggcttacgttttttcatctgctcacgtatccggtcaaatgtaacgatcgtatcatttatcgagtaaccgattatggtgagaattgcggcgataaaggtgacatcgacctccagcctggtaatgctgaaaaacgcgacgataaagaaagcgtcatacagcagggatacaattgcggcgacagccattctgtactcgaaacggattgacacgtaaataataatgccgattgatgcaatggcgacggcatataaggcattacgggccagttcttttccgactgtcggcgataccgtgctgacgttcggttcagatccgtatttgtccttaaagtacgttttgatttcagcgattttttctttagatggctctccgacaaaccgggccgcggcaacatggttctctttaccagaaagcacgatgttttccggttccatgccgagagagtcaaagtctttttcaacctgctgcgccgtcaatgcatgattgctctgcacgtcaatccgcgcgccgcttgcaaaatcgattcccaggttgagcttaaagaccagtaagatgataattcccgcaatggttacagcgcttgagaaaataaagaaatattttcgcttgctcgtgaaatcccatttttggaatgccgtatgcggttcagtattttcatccgttttttgaatgtccataatatgttttttcttgacgccgaaccagccttttttccggtcaagccatctgctttccacgagaagggagagcaggaatcttgaaaggaagacagctgtaataaagcttgtcagaattgacagaatcagcatcgtcgcaaacccttttacagagcttgtcccgaaaataaagagcacgaccgctgcgatgatcgttgtgatgttcgcatcgaaaatcgtcgcgaatgaccgtctgttccctgaacggaaagctgagcggacggatttgccgagtttcagttcttcttttatccgttcataggtgatgatgttggcgtcaaccgccatcccgacacccaaaatgagcgccgcaatacccggaagcgtcagcaccgcctgcatccagtcgaacacttgaagcgtaatatatacgtatacagaaagcgtaattaccgctatgagtccaggcagtctgtaataaagcagcataaataagaaaacaattgcaataccgatgatgccggcctctaccgtatcatgcaaagcctgctgtccgaattgcgcccctactgaagtagagtatttttcggtcagcttcacaggcagcgcgcccgcgtttaaaatattggccaagtccttcgctttttgaacggtgaattggccttcaatcgtgacatccttcgtgtttaattcctggctcacattcggagcggatacatatttcggatgttttttgccgacttcttttttaaatgaatcgcctttttggtaatcaagccagatcacaagctgattattaggcgccattttcttgacttttttcgtcacttctccgaacttatccgcatccttcagcttaacgctgacaatcggttcgttcgtcgtcggatcaaaggtttgcttcgcgccgttttccacgagatcagagccgtttaacagctctttatcattcgtatccctgaacgagagctgcgcttccgttgacagaatttcgcgcgccctgttctgattcgtgacgcccgccagctgtacgcggatgcggttatttccttcaatctgaatgttcggctcgcttacgccgagaacgttagcccggcggttcagcgcctgcaccgtgctgacgagcacgtcttttgtgattttatcgccttttttgacgggctgcacatcgtacagaacttcaaacccgccgcgtaaatccaatcctaacgtaatattattggcagccggttttgtaaaataccccagccctgtgccgatcaataatacgatcaggaaaaacgcaatcaagcgtccttttttcattatgtatttcctccttaaacctatgccgtcaaatcattatctcagcagttcatctaaagcttcctgaccctcatcgctttccagccaattagacgacttaaaagcttcaacggttgcatagttcataaaatcgccaattttaactgataaaatatgaccggccaattcatgcagcggcagttcctttttctgtttccactttttatgtattaagtatgaccataaactctcgtgctcaacatcatcgtatccgaggattttgaactcttcaagtttactgtacaagaaaggccgcaaatgatctttgtacatttcggcgggatgtttctccactgggcgctcgctcctttttccatttttctcgaagacttgtcatgctcggacgacatcggcgcatatctttattgtatatgattccaggtagtttgagaaggcaggggtttataaaatggcaaaacagacttttttaaggggcactcttattctcatcgcagccgggatgattacgagaatgctcggctttgtcaaccgggtggttatcgcccggtttatcggtgaagaaggggtcggtttatacatgatggctgccccgacatttttcttggccaccactttgactcaattcggcctccccgttgccatcagcaaacttgtcgctgaagcaagcgcgcggggggaccggcagaaaatgaaacacattttagtgatgtcgcttaccgtcaccgggatattaagtctcatcttcacgccgctgtttttatgctttgcgccgattatgtccgaaacgatgctgacagatcagcgcacggtttacccgcttctggcgattacgcctgtcgtaccgattatcgcgatctccagcgtgctgcgcggttactttcagggcaggcagaatatgaacccgctggcgttttcccaagtgcttgagcagatcgtgcggatttcacttgtcgcagtctgcacgacggtgtttctgccgtacgggattgaatatgccgcagccggagccatgatttcgtctgtcatcggggagcttgcctctcttatttatttattcatttgttttaaagcaaataaaacaatcagaatcagaaaacaatttttcaagtcgattgcaaatggaaaagaaaccttccgccagctgatgagcgtgtcgctcccgacaaccggaagccgcttcatcggaaatttatcttggttttttgaacctattgtcgtcgcgcagagccttgcgattgcaggagtggccaccgctgccgccaccagccagtacggggagctgaccggatttgccatgacggttttgacgctgcccagctttataacctattctctgtcaacggcgcttgttcctgcgatcagtgaagggatggagcaaaaaaagctgcaagttgtcgaataccgtctggaacaggcgatgaggctgtgtcttttaagcggaggcatttcggtggttattttattctctttcgctgatgaactgatgtccgtcatgtacggatcaactaatgcggcggtatttgttaaagtgatggcgccattttttctgctttactattttcaggggccacttcaggcggtgctgcaggctctcaatttagccggggccgccatgatgaacagttttatcggcgccgctgtcaaaaccggcctaatttttgttttggcgaccaggccttccttgggcatcatgggcgccgcacttgcgattgtaacggggatggtccttgtcaccctgctacatgcggccaccgtaagcaaggtgcttccgatcagcattaaaataaaagaatacgcgctctgttttgccgtcatattcatttgcggttatgtcagccgcatcatcaaacacgccgttcatttttcagggtcagaggctgttaatctcacaggctggattgcaatgaccgcgattttgtacatagcgcttcttctgttattcaggctgattaaaagggaagagctgatccggattccggtcatcggcaagttcgtgacgcggtaaaacccatttatggctcccctttttcatctttaagatcaataaaaaaagcgccgtccgtaaacgtgcagaatgatataaccgaaagatcgcgatatcctctttttgctaaatttttttcgagccagtgtttatctttcccgattctgtccagatgctcgttctgaatgaccccgtcaacgataagcgatgtttccatctgcttatccttattgtttttctttttgacgatcgacagtttgcctgaagactccaaaatggcgtatgacacgtcagagattctatcgatgttattttccctcagctgcataagaagatcgtcaaaattgtagcgctgcgatctcatcgcccgttcatcaatttttccctgttttataataatggtgggttttccgtcaagcagctgccgtattttttggcttttgagcgaaataaaagcaaggcttacttgaataatcattaaaacgacaatcggcacaattgtatgcaaaagcttatcttttacattttcaattgccaatacggcaatctcggcaatcataatggagacgacaaggtctaaaatgctcagttctccgatttcccgttttcccatcagtctgaaaatcacaagaatgataaaataaagcacaatcgtacgaaacgtaataatgataatatcttccatatcgcacctccaacggtcatagcatttgccatcggctctgaattatgtaagaaacgggctgaacatcatgcatttacgtctaattcgaacattcagagaatacatttagaaaaagacgggctccggcttgtcatatatcaggccgcagggcggagaggagataaaaatggaagaaacgaaacaagtgggaagaggcgtcttgtatggcttagtggctatctttgcggtgatgcttcttacgagtttggcgatttcgcttttactgacggttacctcaatggaagaatcatctttcagctggctgatcaccgcgctttcctttctttctttatttgcgggcggttttatatcgggcggcaaagcgaaggaaaaaggctggatgatcggagcgttaaccgccgtctgtttttcattaatcatcttgctgtttcaatatttagggttcggaaaaacgtttacatccggtcagcttttgtttcatctcggctttttgggagtcagcatgctgggcggcattttcggagtgaatttgaaaggaagcagatcagcgtaataaaaaaagagcggattctccgctctttttttgtatgtatgagcttcgctgttattcagcggaagcttctctgattgcgcggcggtcaaatgttaaacgggtgttatcacctgttttaatgacgaccttgctttcatcaattgaatcaacagtgccgtgcaatcctccgattgtcaccactgtatccccttttttcagttcttcctgcatctggcgtacggccttctgctgcttttgctgcggacggatgagcaggaaataaagcactgcaaacattaaaataataggaacgattgtgcctaaagtacccatctatttccctcctttcaagaatggttttatttagaagcttttcgcatttggcttattatagccgtaacgctcaaagaactcttctcggaaatcaccaagacgatcctcccggatggcttgtctgacctgctccattaagtgtaacagaaaatgaaggttatggtaagttgttaatcgaattccaaacgtttcattacagcggatcaaatgtctgatgtaagcgcgggagtaattttggcatgtatggcagctgcactcttcgtcaatcggacggaaatcacgctcatatttggcgtttttcatattcagacgcccttcattcgtaaacaccgtgccgtttcgggcaatccgggtcggcagtacgcagtcaaacatatccacgccgcggatggcgccgtcaattaaggcatccggtgaacccacacccattaaatatctcggcttgtccttcggtaaaagcggagttgtaaactcaagcactcggttcatgacgtgcttcggctcgccgacagataatccgcctatggcataacccggaaaatcaagcgaaaccaagtcttttgcactttgtgtccgcagatcttcgtattctccaccctgtacgattccgaacagcccctgctcatctgagcgcccgtgcgcctccaggcagcgttccgcccagcggctggtccgttcaacagagcgtttcatgtaatcatactctgccggatacggcggacactcatcaaacgccatcatgatatcagagccgagggcgttttgaatttccatcgctttttccggagataaaaacagcttgtctccgtttaagtgattgcggaaatgaacgccttcttcttctatattacgaaacttgctcaatgaaaagacctgaaaaccgccggaatccgttaaaatcgcgcggtcccagttcataaacttatgaagcccgcccgcttcttttacaatgtcatgtcccgggcggagccataaatggtacgtattgcttaaaataatgcccgcatccatagatttcagctcgtccggagacatcgtctttaccgtagcaagcgtgccgaccggcataaatacaggcgtctcaaaggagccgtggggcgtatggactctgcccagtcgcgctcccgtttgtttgcattcctttataaattcataacgtatcggttgttcagccactttgtatgaggcctcctgtcattcaaattagataatcagcatggcgtcgccaaagctgaagaaacgatattcctcttctaccgcatgacggtaggcggaaagaacatgctctctgccggcaagcgcagaaacgagcatgataagcgaagatttcggcaaatgaaaattggtgatcatgccgtcaatcgctttaaattcatatcccggataaatgaagatggacgtccagccgcttgaagctgtaaatacgccgtcatgctcgccggcaatggtttccagggtgcgcgttgatgtcgtcccgaccgacacaatgcgccctcccgcctttctgacctcgtttaaagaggcggcggtttcttccgtcatttcataaaattccgcgtgcatgttatgttcttccacatcatccgcactgaccgggcggaatgtgccgagtcccacatgaagtgtgataaattcaatccgcacacccttttgcttcagctcgtccagaatctcttccgtaaaatgaagtccggccgtcggagctgcggcagatccgatttcttttgaaaagacggtctgataccgttctttatcatcaagctgctctttaatataaggaggcagcggcatttcaccgagtgattcaagcacttcgtaaaaaatcccgtcataccggaattctatttttctgcctccgtgatcaagctcctccgtgcagaccgctgtcagccggccgtcgccaaatgtcaggaccgttcctttttttacgcgtttcgccggctttacgagcgtttcccatgtatcattttcttcctgttttaataacagaagctccactttcgctcccgtatcttcttttgtgccgaataatcttgcaggcagcacacgggtattgttcaagacgaggcaatccccttcattaaaaaagcttacaatctctttaaatgaactgtccgtcagcccgcccgtctgtttgtcgagcaccatcagccgcgatgcgtcacgctctttcagcggcacttgggcaatgaggcgttcaggcagttcaaaatcaaataaatcgactttcatcatttcaccttaattctgtctattgttatttcattctgccgaaaaaattaagcagaatggatagtatcacactgatcacaatacaagtgacaacgggaaagaaaaacgtaacatttcccttcttaacgaaaatatctccgggcagccttccgacaaagtgccagactgcgccggcaagaagcaaaacggcaccgagaaccatgagaaccttcggaaagtcagtcacgggcgggcgcctccaatcgaaaatgttcatacacagccggagtcacgacccgtcccctcggcgtcctctggagaaatccgatctgcagcagatacggttcgtacacatcctctattgtatgcggttcttcgccgattgtcgcggaaatcgtatcaaggccgacgggaccgccgctgaatttttcgatcatgcccatcagcagcttatggtcgatatgatcgaggccgagcgcatcgacttgaagacgttcgagcgcatcgtgagcgatttcttccgtgatgcggctgtcgccgagcacctgggcaaaatctctcacccttctgagcagccggtttgcaacccgcggtgttccccttgaccgtctggcgatttccagagccggagcttcttcgatatccacttcaaaaacgtcagccgttcttgacacgatatctgtcagctcttcctgcgtatagtattcaaggcgcgacagcaccccgaaccggtctctgagcggtgcggtcaataatccgacccttgtcgtagctcctacaagcgtaaaagggggaaggtcgagacggacggagcgggcggacgggccttttccaatgacgatatcaaggcagaaatcctccatcgccgggtacagaacttcctcaattgagcggttcagcctgtgaatttcgtctataaacagcacatcccctggttcgagcgccgtcaaaatggctgccaaatctcccggtctttcgatggcgggacctgacgtcgtccgcatctccacacccatctcattggccacgatagacgcaagcgttgttttcccgagacccggaggcccgtataaaagaacgtggtccagcgtttcctgcctcattttcgccgcatcgataaacacgcgcagattttctttcaccttcttttggccgatatactgggcgagattctgcggcctgaggctttgctcgattattgattcatggctgtctgcttcacttgaaacgagccgttcatccatgaacatcaccttactttaataatttttgcaatgcttttttcacatattgatctgttgaaagcgccgtttcctcttttaagtgaggaagcacttttttaatttctttttcggcgtagccgagaacccggagcgcttcaagcgcctcgtcaagcgccgtttcagcctcttgtttttcaatgcgcgcttcatgattgaacaggttgtcaatcatttcaggcacgacgtcggccagtttgcctttcagatcaagaataatctgccgcgccgtttttttgcccacacccggaaatttcaccaaaaaggcctcatcttcctgttcgatcgcttcgatgacggctccgggatcaccggaaccgaggatggcgagggcccctttaggcccgatgccggtgacgttcagcagctttgtgaaaagcgctttttcttcccgggttgaaaaaccgtacaaagaaaaggcgtcttcttttatatgatgatacgtaaaaatggtctcttgattgcttaccttataaataaacggattcggagtgaagacctgatagccgattccgccgttttcaatcacgatgtattggggagatacataatcaatcgtccccttcacgaattcaatcacacctattcacctctttgactgcttatcattgtaacacaaaaacagccaaagtcttatagaaaagttaacgtatgttcgctttgacaccttccattcagaaaaaaaagacatgtgtcacatgtcttgcgtcaaagtcagccgctgtaagtcttaatatgatcgatcacgctctcaaactccgcttttgtcctgtacggtataccgtgttccaaatgcttttgcaatcggctttccagccgctctatatcaatctggaagaaagactgaatcggctcagccagcgatccgggacggccgtgaaatgtggagatgacgcctccgtccgtgacgccgatataaccgttaaccttactgagcggggaaatgtcatcaacatgcttacggaaaaggacgaagccttttttctgctcaacgagcgtccagccggcgtatgcggcccaaaaatcctccatcgctaaaacggtttcatccgtatgttcaatgccgacatcaccgtcaagatagaccttttccagctggacatgcacccgaagcggcccgtaatgctcgacctccgccccgtatgcgccttttcctccgcaaatcagggccgcagccgataagataagcataaacaatagacgcgcaccgcaaattcgtttcaccaataacacctctttattcaatcaaactcttgatgctagtttgaccaaagatgccggtgcttaatcgttttctttcatttgtctgtttcaggccgaaaaaaagcagcctctatatgagggctgcctcgatgattatgcccggccggctgaaatcagtttcatttgtccgggcgtcagtttgagccggtatccccttacggtcagatacacagtttttgctccgcggcttttgtcatgctccgtttttttcatcccggccctccgttacgttttattacttttatgttaacaccgcaatataaagagcgttttaagaatatgtaaagaaatgatgaagatttatccataaaaatactgccggatgaaatcatccggcagtccgtttaacggctgtttctgttcatgtcttgcagctttgtaaaagtagcgttgtcggtaaacacttgaattgtacggccgtccgcgaattttttggccgcatgtttgacatgtttatcatcatttttcgtaaaaggatgatttgttctgacggcaatgacgactctcgtgtcagtcacgatgacctgactatcctgtacgccttttacttttttcacgcggtttgcaacttttgctgccaacctgatgttttcggcgttgtcatacccattataagacattgctgccggcggcgtattgacatttcggccgttatatgtgccgtccgtcgttaacggaaccccgtcattaggcgcgtactggtcggacacgtttgtcgtattatgacggccgtttcggttttccatcatttcagaaacgggtccttgatggtccattccgtactggcctctgccgttaccattatcattcgaataatatccgaccggacgtgttgactgattgtagcgtccgtcattcatggcattatttgctccgcatgccgttaagcttgccgtcacggctaaaacgcccgcgatcgtcatcagttttttacccaatggaaaaaccccccgtggattcatcgctgtttgagcgttttccgctcatgtttaggatgtgcggcgggcggcgggtttaagcttgtcagttatgtccattcctcagttggacataaaaaaaggaacgacatacatcgtcccgaaacattaatcttcttcttcctccggccgtccgaatacttgatttggactcggctgattcggcgcgacattgggatttcctccgccgtaaggcataaaatgtcctgcgtttgcatccatattcggatacggctgcacaggcatatttgcgtgatggtgatgtgaaccgtggtggtgatgatggtgatgatgtgaatcatggcagccgcaatcatcatccttatattttccatcatgatgaggtgcgtttgcgtaatgtgacgaatatccgccgtaatacggcatttgaccgtaaggagcaccgccgaaaccagatgcagaaccatcataatgctctgcattttcatgggcctggttttcatattcaccgtaacccgcgtgcggcccaaatcccggatgatggaatccgtacggtaacggcatcggcattaccggaaagcctccaaaacctcctccaaaaccgccgaaacctccgcctaccgggaagcaagggtggcataatccagaacccggcagcatcggtgtcaccggaaccggacaaggacaaggcatgcacggcatcgggtaatgcataaaaggcggttcaacggccggcatattcggaaacgggacattcggaatgtttggcatattcggcagatgataagcggcgttttcttcttccatctttccggcttcaggcgcctttggcatattcgggtaattcgcgttttccatgttgatcatttcctcctgttgtggaatgttattgtcatgctctttttctttcggctcgacaaaatgtgtcaccggttcctccggcttaggaggcgaccacggctgaaacagctgattggacgggtaatattggttcatatcagcttccggcagcacattttcatgcttttcagggattggcggcacatacggaattgacggctttggttcttccggtattgtgtcttcaatgtccacaactgatttcggtttttctttggcatatggatgctcatgcttatgcgcagacgttccgaagccggccttaggttcttttctgaccggaacggcttctgaaggcacctttatcttcattccaggcataattaagtctggattgctaagctgatgattcagtttttttagctcttcaagatcaactccgtatttttcagctattttccagagcgaatcgcctttttgaacgatatgaattttcaacgttttcccctcctatgcacaaaacgtgaacggtacatttgtcattacaatacgtttcttcacactatatgccggtggactgggcatgatgataaaaaattttgggaaggaggggaaatttttataattacgtatgactcagcattctgttcaaagcacgaagcgcatctgtccgaaccgcttccggaactttaatgacacccttcggctcgcctttttcaagctgctcaagcgaccacaataaatgcggcaggtcgattctgttcattgtcagacacggacacatatcgggattcaatgattcaatctgtttatccggatgcgattgaatgaggcgctgaacaagattcatttccgtgccgatcgcccatttgcttcccggttcagcctgttcgatcgtatcaataatgtatttggtagacccgctgtcgtcactgagcgagaccacttcccgcgaacattccggatgaacaataatgcggatgccggaatccctctgccgcagctgagaaatattttccgctgtaaacttttcgtgtacggagcaatgccctttccaaaggataaccttaatgttttccggatggtcagtaagcaatcggttctgcaccgggtcccatacagccatttctgtcagcggaatgccgaggtcataggccgtatttctgcctaaatgctgatccggcaaaaataaaattctctctttttgtttaaaagcccatttcagcacactccgggcattcgaagaggtgacggtcgctcccccgtgccgtccgacgaatgctttaatttccgccgtcgagttaacatatgttaacggaatgatggtgttaccgtacagttcttgaagctcttgccatgctttgtccgtctgctgaatatctgccatatcagccatcgagcatccggcgcgcatgtcgggcaaaatgacggtttggttatcatcagtcagcatatcagcggtttccgccataaaatgcacgccgcaaaacacaatatattccgcctctttatttttttctgccacttgagcaagctgcagggagtcacctgccgtatcggcgaattgtattacttcgtctttttgatagtgatgccccggaatgaacagacgctttccgaaagcccgtttaatggcggcgacccgcttttccatttctccggtgctcatgtctttataatggctcggcatcatttcggctgatgcagttagcacgtcaaaaatagacatcttaaaaatccccctgttccgcagcctcaacatccatgctgatgtcggcgctttttactgaatgagtcagaaatccgagtgaaatatattggacgcccgttcctttataagcgggcaatgtgtcgagcgttatgcctccggatgcttccgttttgatatggccaggtgtcatgtctgcaaaacgccggacggactcaggcggacagttgtcaaacataataacgtctgcgcccgcttctattgcctcaagcagctgctgttcggattcgatttcgacttccaccgcaagcatctgccccgccgtttttcttgcccgctccacggccgcctttatcgatccgcaggcggcaatatgattatcttttatcatgatgccgtcatataagccgaagcgatgattaaagccgcctccgacccgaacggcgtatttttccagcattctgagcccgggtgtcgtttttctcgtatcacaaatcttaatggacggatcatcaagacgccttttggcctcatccgtcattgtcgcaatgcctgacattctttgtatgagattcagaatgacccgctcccccgtaagaagagccgccgtctggccttccatttcagcgagcacgtctccttttttcatccgttctccgtcttttttcagggagcggatgcggatgtcatcgtgtaaaagcttccatccttcacggataacggcttctccggcaaacacgccgtctgtttttgcgatgattcgcgctttacattgctgatcagaaaaaatcgcttgtgacgtcgcatcacccgttccgatatcttcctgaaaaaaataagtcagcatttgtttcagctgcagaatgtccatagttccccaatcctttcgttttttctgataactgttccagatgttgaatgaatgatttgttttccgtgccactctttctccgtcccgggaaaatcagcgcgaaaatgagcgcccctgctttcttcccgaataagggctgaggtcacaacaagttgcgcagtcttccataggcaggatagctcggcttgttctattgtgatatccttcacatttatatgacgcacagatacgttgttaagccaggatgccagcgcctgcatgttttctttatccctgacgatgcccgctccggttgtcattttggcttggagcacatgaagcgatgtgtccggcacttctaagatgacgtcagatttcttcggggtttttttatatcttccgtttaacggcgtttgagtgatatgttcagcacatcgttgcccgcttgccagcgcttccagcagtgagttgctcgcaaggcggttcgccccgtgcaatcctgtgcaggcggtctcgcctatggcgtacaaatcaggcacggacgttttcccccaggtatcggcttttactccgcccattaaaaaatgcattccgggtgctacaggaatcccgctttcaagatcaacaccggctgtttgacaaatacctgttatggtcggaaaacgtttcttaaaatcggctattctgctgcaatttataaaaacaggattttctttcatcatttcttcataaatcgcccgtgaaaccacatcccggggcgccaaatcttctagcgcgtgtctgcaagccatgatcctgcgcccgaagcgatccgctaaatatccgccttctcctctcactgcttcagaaatcaggccgtacacagtcccgtttttcacaaggagggtcgggtggaactgggtgaactccatatccgtgatctcagctccagcgcggaaggcaagagcgatgccgtctcccgttatggcggaatcatttgtgtgatattggtacaaactgccgcagccgcctgatgcaagcactacacaatccgctcttctgtaagaaacagcgcctgaagcatccattacggcaacgcctgcgcatcgtccgtgttcaatcagaagatcaacaaccgtctcgtgttcaatgatccgtatgccgtccctcagctgctgaaccagaaactcaaccaacatccgtccggtcgcatctcccccggcgtgcagaatcctccttttcgaatgagcgccttccctgccgagacaaaacgttccgtccgacttcgtatcaaaagggaaatggccttctatcagcctgtttatcatgctctgtccgcttttcagcaaatgccgcacggctgtcacgtcattgtgtccgcatcccgcatacagtgtatcgttcacatgggattctaaagagtcatcttttgcgtatgaaacagcaatcccgccttgagcataatgcgaattgctgttcgttacgcttctctttgtgatgacggtcacttggtatgacggaggaaatgaggaagcacaggcaagggccgccgtccccgaaccaatgacgataattgttttttcagacatacatcaccctcctgttatttacacctgtcttgacacatatatttacacaacgataaaataaactcaagcttttttttaacataaacggataggagacgggctgtatgatttatcttgattacgcggcgggagcgcctttaagcaaagaagccgcgaaagtctttcagcatctcagcacagaggtatacggcaatgcaagcagccttcatgacgccggaggaagagcggcggacgtgctggaatattgcagacattctgcaggaaaattgatcggcggagcggcagacggcatttactttacaagcggcggaacggaagcgaacatcttggccgtccaatcattgctgcacggtctgcccgatcacaaaaaacattttattacgaccgcaatggaacaccattcgatccataatgccgcggcgtttttagctgaccggggaattgatgtcaccatcatatatcccgacgaaaacggccttataaccgaagacatactggcggctcatatccgtcctgacacggggctcgtttccatacagcacgccaattcagaaaccggcctcatccagcctgtgaatcgtctggccgcttttcttcaccagagaaacattttgcttcattgcgattgtgttcaaagtttcggcaaactgccgattgatgcggatcaggcgggaatcgacgccctttccgtctccggtcataaagtatacggcccgacaggcaccggggctgtttacattcggcccggtgtcagctggaacccggtttatccgcataccgtgcatgaaaacgggttcaggcccggtacggtgaatgtaccggcaatcggcgcttttaccgctgctgcggagtatgcagtgaaacatatggaggaacaccgtgagcatgctgacaggctgaggaattatttgtatgaccaaattcggcgtcaaggcctccccatttcattttcagaggaagaaaccggcggtgaatgcctgccccacattgtcgggtgtttttttcaatcctttgaaggacaatatattatgttagaatgtaatcgtaacgatatttgcatctcaaccgggagcgcatgttccgccggcagccacggcccttcttcagctatgaaggcgctgagaaaaaccgaacgggaagcgcggcagtttttccggatctcattcggaaacgaaacaacatgtgaacagctcgatatgctgatacatacatttacggcgctatgggagcaaaagaaaggagaatcagcaatttgacagaaggaacgaagcttacaggggcgaaaagacgcgacatgctgcttcattggctgaaagaagccggctcgccattaacaggaggcgaattggccaaaaaagcaaatgtctcaagacaggtgatcgtgcaggacatatcactcttgaaagcaaaaaacgagccgatcatcgcgacgagccaaggctacttatacatcagcatgaatgccggcggcggaaataacgccgaacggattgtcgcctgtctgcatggcccggagcggacggaagaagagcttgaactcattgtcgatgaaggcgtcaccataaaggacgtaattattgaacaccccgtgtacggcgatttaaccgccgccataagagtcagcacacggaaagaagtcaaacaattcatggatcacattaactcgacaaatgccgcttacctttcacagctgaccggaggcgtgcaccttcatacgttaagcgccccgacaaaagagcggattgaccaagcctgccaagcgctgaacgacgcgggtattttaataaaagattaaaaaaaagccccctgaagggctttttttatatcgaataggattgatatgttcccagaagcttgacccggcagccgagggcttccatctcttgaacggcaccgggaatgagaacctgatccatcgcctgttcaatatcaataataaagaaatagttgccgagaccggtttttgtcgggcgcgattcgatctttgataaattcaggtttctccatgaaaaagcggacagcaccctgtgcagcgcacctgattggtcatcttggggaagcgttaccatcatcgtcgttttcggccgtgaagacagtttcgcattcacttcgaatgagacgtctttttcaggtgaaagaatgacaaatctcgtgtggttgtcctgataatcctgaatatcccgcttcacgatgctcaatccgtatgtagcggcggccatttcatttgcaatcacgccgatcggaaggtccgaatgctcactgacatacttggcagccgcacctgttgacttcgcatactcataaggaacggacgaaaaatgccggtgaagaaatttgtggcattgcgcaatcgcatgggaatgagaataaattttctcaagctttttccactcattttctctcgaagggtgaacgagcagatgctggtgaatcggcagcgtcatttcccccacaatcgcaagaggctgctcatgaatcaaatagtcaatcgttaagttaaccgagccctccagcgcgttttccaaaggaacaaatgcaagatcaacttctcccgcaaccgccgcatccatgcatgccggtattgtttgataaggtgcttgtgtcacgctgttttgaaagcaggaactgactgctagatgtgtaaatgtggcttctggccctaaataaccgactttcatgtctcttctctccttacgcgcctgaccctaagatctcaactttttctataaaatcaaattttctcagtttattcattaacgtatgaatgttttcttccattgcggacgtactgattgagagcgtgacattcgccctgccctgaagcggaatcgtctggtgaatggaaagcacgttgcttcctgagtcagccaccgcctgcaaaagctgggataacgcgcctgaccgatcctccaaatgaaagaaaagtgtgattatttgttctttaaccatcgtgtaaaaagggaaaaccgcatctcggtatttgtaaaaagcacttctgcttaaatcaactttctgcacggcatctgcaaccgattcagccttttttctgtccagcagctttttgacttcaagggttttccgcatcgcatcaggcagaacgtcttcacgcactaaataaaatgtctcttctttcacctgcacccctcccttttacatcagagagcctgcaatgcaagctctccgtttttttaatcaataaattcaaattcaaattccagaagccggatgatatcgccgtctttagcaccgcgttctctgagcgcttcatcaacgcccataccgcgcatctgtcttgcaaaacgcttgacggattcgtcacgggagaagtcagtcattttaaagaggcgttccagactgtcacctgaaagcacaaacgcaccgtccggatcacgggtaatgttaaatggaatttcttcgtcttccatcgtgtacattacgcggttttccgccagttcttcttcatcatacagcgggaattcaggcgttgtttccagctggttggcgacttcaaacagaagatcgcggagcccttctctcgtcaccgcgctgatcgggaagacaggatggtcatcctgaagcttttctttaaacgctttaagattttcagccgcttcgggcatgtccattttattcgcaacgataatttgcggacgctccgtcagccgcagattatattcactgagctcctgattaatggtcacataatcctcatacggatcgcggccttcgatcgctgacatgtcaatgacgtgaacgatgacacgcgtccgttcgatatggcggagaaattggtggcctaagccgactccttcatgcgctccttcaatcaaaccgggcagatccgccatgacgaagcttcttccgtcatccgtttccaccatgcccagattcggaacaagcgttgtaaaatgataatcggcgattttcggctttgccgatgaaacgacagacagaagcgtagattttccgacgctcgggaagccgacgagacctacgtctgcaagcactttcagttcaagcacgatatagcgctcttttccgggctctccgtgctctgacagctgcggtgccgggttggccggtgtcgcaaagcgggtatttccgcgtccgccgcgtccgccttttgcgatgacggcgcgctgcccgtgctcagtcagatcggcaatgacctgttttgtatcgtcatccgttacgactgtgccgggcggaactttaacaaccatatcgtccgcatttctgccgtgctggtttttagacatgccgtgctcgccgcgtatcgctttgaaatgccgctggtaccggaagtccatgagcgtgcgcagtccttcatcaacctcaaaaacgacgtcgcctccattacctccgtcaccgccggcaggcccgcctttcgggacatatttttcacggcggaacgcaaccattccgttaccgccgtcgccgccttttacatatactttcacctgatctacaaacataatatcctccgttctaaaccgtaaaaaaccgctagttcattccaatttcggccacacattcatggccggtcagctcaaattgcatgacatcaaagtcctcataccgggatttgcgaaattcatcaaacacatctgcatttgcaatcgttccatgaaaatcgagatatacaataagctgtctgtcagggtgatccgtctgcagcgatacggtcagatgattttcactttcattgcttactgccagaccgaacagatgaaacagttttctcatcaggttcgacagcttttgatcatatgccgataaatctttaatttctccgagcacttcgtattcgagtctcatataacgggacttccaattaaatgtaagaaagtcaaacgccaagtgcggggctttcaggtttgagagctttgattcgtgctttgcatctatgaccatttcgtcaataatttcaacgaccctgtcatacttctgcaaacttaagtttccttttatcagctgcagcttattcatccaatcatgacggaaatggcccattaattggatcagctcattgatcagagccgcatcgcttacaggttcttcttgtttcttcgatacatccttcattttcgcactcccaatcgtttaatttctttttaggagtcttgataagtgtgtactatgaattataacagagaaggctttgttaaaaaaacacttgtttttcctggttcatcatgttcctttttcggatcgcatacaatgcggatgccaggcagaaacatttttggtatcactgcttggggaacatatccagtgggtatgggaagctgatgtcctcattcaaggcggggttcactcacgcatcctctgcttttcattcttgatgttactccgcttactgcaaaaaaaactccagtcaacgaccggagttttttgtgtcattattgagctacaggatatacgctcacttttttgcggtcacggccgaaacgttcgaatttaacagttccgtcgattttagcaaaaagagtgtcatctcctccgcggcccacgttttcacctgggtagattttcgttccgcgttgacggtaaaggatagatccgcctgttacgaattgaccgtctgcacgtttagcgcctaaacgtttagattcagagtcacgtccgttctttgtagaacctacaccttttttagaagcgaaaaactgaagatctaatctaagcatgtaactcacctcctatatttggtttgcagtcaaccgtaagtgttcactgtaatcccgctcgatcgtttcaagagaaacaatcatgccttcaatcagcagctgcgctttttgcaaagcttcctgatcagcggcttcagggaattcaaagtagaaataacccccgtcctcgcctatatcaagaatcggttcgagaggagccagcgcgataaccgcattgaccgctccgaaaacgacagctgtgaccccggcacatacgagatctcgtccatgttcagcaaaatcggcatgtcccgtcatttcaaaggacaaaatgcccccgtcattccgggatcttcgaattgttgcctcaatcatgcttacgcgttgattttttcgattgtcaatttagtataaggctgacgatgaccttgttttttatgaacatttttctttggcttgtaacggaaaacagtgatttttttcgcacggccttgtttttcaactttagctgtaactgtcgcgcctgcaactgttgggttgccgactttcacgctgtctccgccaacaaacaatacgtcttcaaacgtcactgtttcacctgcttcagcagcaagtttttcgatgtaaacagtttgaccttcttcaactttgatttgttttccgcctgttttaatgattgcgtacattctctgcacctcctattagactaagactcgccagcaacagggggctttaaagctcttatcacctgtcccgagcggttgtagcattggtgctacatccataacattaaaaaatatatcagaaccaaaaggatatgtcaatctatttctagtaaggcagcagcaggtcttccatagaggaatctgtccgtttatcggcaaaatacgcatgaagcacttcattttcatcgagctggctgagcttttcgccggctttttcaatgataatggggtgcttgcatccccgtttgaattcggccatgacatgctttactttggcatcggccgcgaccgtcaaaggatgcagcatggcgacatcacggtttttgccgtagtatctctccaaaagaaacctcagctgaatatagtgccgcttccggtattcatcccataaagaagcggtgagaaagacgaacagcacccatgcgctgacctgaagggggacggccagcacaatccagcagcagagcaaaagcgcggaaacggccgatgtctgcaggctgaggagatgcgctttttgaaaagccatttgtttagaaaagtataaaaacacaaactttccgccgtcaagcggccagatcggcaaaagattgatgaaaagaatggagagattataaaaggtaaacatctcaaatgtctgctcacttgcaaaacctgacatgaaaaagagccaggctgccgcctgaagccacacatgctgaagcgggcccgccagaatgaccgcgaattcctctttaagcggccggtttccatgctcctccacctcaaccgtcccgccgaaagggagcagaaagattcgtttaatgcgccacgaaaaaaacacagccagagcagcatgccccagctcatgaacggatacgaccagcaaaagacacagcagcgctttgatgtgccccgtcataagaccaagccccatgataatccaaagaaaaggatggacatgaactttgaaaaggaggctgagccatttattcatcaaaagtgatcacctggatcggatctatgaatttatcgccatcctggatcgcgaaatagtactggcctttacttttatcgttgagcttgatcgaaccgatctttttccctttatcgacaaagtcgtacaatgaaacgttaacatcttttagccggccgtaaatgctgcttgtattgtcggcgtgctgcaccttcaccgtcagtcctgtttttttatctttgctcacttccataatgtagccttcttttacgctgtcaatggcttcactggcagtttcgacgacgacgccctctccgttattttgaaagtcctgctggattttccccgcggcaggaacagccatatcctgactgaccgccacctgaccgtccttctttttcgttcccggcgtaagaaaagcgagcgggtttccgaaggaagatacgaaccaattgcttacggcagcaaactgaaattctttttgaaaggtttgtgcgatcgccggtttgatctgactcagcggctgtttgtcagttttataggcaatagcggagatcagtacgagacaggcggccagcaggcattttaaaataatagaatgagcgctgatcaatggatgccgtccgttaaattcgggcgggtgttccgtttgatattcgtagtccggtagaagcttgtgcttttcctgctccttgaccgtctgccacgcgggaaaattctgcgtttgggcgttttgaacgaaagtccgttttgattcaggccgctgttttcttcttttggccagtctttttctaatttcatcagctctgtgactcatcgccatcatcctttgcaatcgttgggtttgtacatcctatgtcttgtccattgcaaatatgcgctcttgaaaaacaaaaaagacctgataagctgggcttcatcagatctttgtattctggtatatattatgaacgcacgccgaaaaatgacttgattttcgccatcatccctttttgctgctcttcaagcacctgcaaaggaacggattctcctaaaatgcgccgggcgatattgcggtacgcaatgctggcgcggtttttggaattcatggcaatcggttcgccgatatttgaagccctgatcacttcatcatcgtcagcaacgattccgaggagatcaatagacagatgatgaacaacttcatccacatccatcgtgtcaccgtttttcaccaggtgatttctgatgcggttcacgataaggcgcggcggttcgatatcttcctgctccaaaagtccgataatgcggtcagcgtcccgcaccgctgatatttccggcgtcgtcacaacaatcgccttatcagctccggagacggcatttttatagccttgttcaattccggccggacaatcaataatgacataatcaaattcctgcttaagctcctgcacaagcgatttgatctgctcagggacaacagccgtcttgtcgcttgtctgggcagccggcattaaatgaagcagatcatcaaaacgtttgtctttgacaagcgcctgatgcgtcttgcatctgccttcaattacatctactaagtcgtaaataattctgttttcaagacccattacgacatcaaggttgcgcagtcctatatctgtgtctaccaaacagacgcgcttccctaaaatggctaaggcggtaccgaggtttgcagatgttgttgttttacctactccgccttttcccgaagttattacgatagcctcacccaatttcacattcctccctcaagccttgttagatcaggtcttaaatgagccaattgctgaaggcgttcaatgaccatatttccgtcagtatctaaataagcacattccatgtcgttccctttttgaatgtggtctggggagcgatttaacacgtgattgatcctcaattgtgtcggcatcatttcggatgcggcgatcacagcccggttatttccgttataacccgcgtgggcaatcccttttaatgaaccgagaacaaatatatttcctccggctctgatcgtaccgccgggattcacatctccgattaaaagcaaatctcccgtcacgtgaagcacctggcccgaacggacgattttgcaaacagaaacaatttcctgctcctctatcatccgctgcgcttcttctttggcgatgacttcactgtcaattgaatgcacgactaaatctttctttgacgcgatcagatcagtcagctgctctgcctgttcctgatacagataccgatgcccgagtttaatatgaacactgattttttggcctttgccatcagtatattgttcaatcgacagcatgttttgaagaccatcgagaagctcatcaaaagaacacgcatcatccagatgcaatgttaagccgttttttgttccttttattgttacatattgctgctttttggtcttcatcaatgttcacctcaacaacatactcttttcgtcaaaaaaagataaaatcctttttactcatctcttaattctttcttcagacttatataaaacagcctgaagggcaggactaatataacggctcccgcaatattcagcaaagcggtgggcaagaaccgctgaatgacaaaatcgttaaacgtcattgtgccgctgcggattaacgtctgaatgccgtaaacgtaaaattcaagcacgcatacgctcagcaccgcgaccaaaatgaccatcagggcgtttgtctgaagcactttaaacgctttggccgccagatagcataaaccggcaaaaccaaacatataaacgcctaaaacacccgtataattaatgtcataaagaaatccgaaaatcaaaccgtagatcaccgcatgcttttggttgatataagcggacataaaaatcagcgcaagcaaaagaaaatgcggaacgacctgctgctcgacggaaacgaaaggaaaacgcaccagatcggtatagatgctttccgcacaaaagaccaaaatcataatcaaagggagaaggaaacgtttcacgatccttcctcccctgttgctacgcttcggttcacgacgatgacatggtcaagatcgtacaggtcggcagccggtttcacgtaagcgattttcgtcaggccgtaagcatctgattctacatcggtcacttccccgaccgtcagcccttgaggaaatacgccgcccgtcccggatgtctccacgaggtcgccttttttcacttcacgtttttcatccggctcaagaatggtcattttcagagtctgtttctttttatcatacccttcaattaaaccgtagcctttgcttccctttttgccggagattttggtggccactctgttattgcggtcaacatcgctcagcagctgaacggcggatgtgaaactgttgagtccgctgcttttgatcttcccgaccagcgcacccttttcgttcgtgacagccatgtctttggccactttctgcttcgttcccttattgatcatgatctgcttgtaccattgatcagggtttctggcgataacggtcgctaaaatcggatcatagtcggaaattgatttgacatgcccgagttcatcacgcagcttcttgttttcatctttgagttcttggagcttcgcttcatattgtgtctgtccgtccagcttttgtcttaagcgttcgttttccttgtacgtgtttttcaggtcttttatgtccccgaagaaccctgcaaaatattcggcaggcgtgtgaaaaatgttttgaaatactcccgtcgtatcaccgatcagcttttcaggccaggtggtattacggccgttcttcagcgagaatccaatcatagccaccaatatgataatacacagaagtaatagcattaaccgtttgttcggcatcgtgatacacctcttctatttaactcctgattatcttgtttttcctttgaaaagatggatgtgctccagtgcttttccagtgccgatcgcaacacaatccagcggatcttcagcgataagaacaggcattttcgtttcgtcactgatgactttgtcgagattgcggagcagggcgcctccccctgttaatacaatacctctgtccataatatcagcggccagctcaggcggtgttttttcaagcgtgctcttcaccgcgtcaacgattgagagaactgtatcacgcagtgcatttgcaatttccgttcccgtgatttcgatcgttttcggcagacctgtcagaagatcgcggccgcggatttccattgacgcattttcttcaccggtttctgctgaaccgatttccattttaatagcttccgccgtacggtcaccgatcatcagattatatgtttttctgatatagctgatgattgagtcgtccatttcgtcaccggctacgcggattgactgagacgtaacaatgccgcctaaagaaatgatcgccacttcagttgttccgccgccgatatcaacgaccatgctgcccgtcggctcccataccggaagattcgcgccgattgctgccgcaaacggttcttcaatcggataagcgtcacgtgcgcccgcttgtcttgtcgcgtcgatgaccgcccgttcttcaacggccgtaatacctgacggcacacacaccataacgtaaggctttctcgcaaacaatcctttatttttcacagcctgattaatgtagtatttcatcattgtcgcagttgtttcatagtcagcgataacgccgtctttcatcggacggagcgcaaccacattgcccggagttcttccgatcatgtttttcgcatcgttaccgaccgcaacgatggacttcgtatccgtttgcagagcaacgacagacggctctctcactacgattccttttcctttaacaaacacaagcgtattcgcggttcccaaatctataccaaggtctcttgtaccaattccgaacatatgtatgtatcttcctttcttaaagcaaaaataccctaaagggaaaaactcataaaatctattatatcttaaatcaacgaaaaaaaaagtgttacaaatatcctttttcctttaaactcacaaattttttgtcaccaatgaccaaatgatccagcagctcgatgccgattaaatttccgcactcaaaaagccgcctggttacctctatatcttccctgctcggtgtaggatctcctgaaggatgattgtgaacacaaatgaaggacgcggcggatcgtttgaaagcttctttaaacacctcccgcgggtggacaatagatgaattcagacttccgataaaaacggtgcgtttatgaatgacttgatttttggtatttaaatataaacagacaaaatgctcctgggataaaaagcgcatatcctccatcacatacttcgccccgtcttccggagagcggatgacgcaatgctccccggcggatgtcttatgaatgcggctccccagctcaattgcggcaagaatctgaacggctttcaccgtgccgattccgggaatgctggaaagctcctgggcagaggcgccttttaacagtcgcagcccgtcaaacgtccgcagcagccggtgagcgaggttcatgacggactcatgtttcgttcccgtccgcagcaggatggcgagcaattcattgttagagagatgttcggctccgaagtgcagaagccgctctctcggtttttctttttcggggaaatctcttaattttaacggcagatcacggatgatcaacccctccttgttccccttcccggtttgaacatcaagcttttatattaaattctttcaaggctctcattgttttagcgacaggaagcccgacgacagaataaaaatcaccgtctatttttttcactaaaagcgcgccttttccttggatgccgtatgcacctgctttatccatcggttcttttgtttcaatgtagagctgtatgtcgtcttcactgagcggccaaaacgtcacttccgtcgtgtcacagaacgtttctttccggtcatgcgtctgaatgctgaccgccgtaatgacttgatggcttcggccggaaagcctccgcagcatgtgtgccgcttcttctctgtcatgcggtttgccgaggcattcgccgtctatgcacaccatcgtgtcagccccgataacgactgcatcgagattttcggccaatacagcaccggctttttgctcggccaaacattggacgttttcttccggcgaaaggtttcgatttaatttttcttctgtgcggcttgcaataatgctgtaaggaatctgaagaagattaaggagttcttttcttcgcggagattgtgatgcgagtattaagcgttttgtcatggttgtcatcctttcagggtttgcttaagaaaaaaagatacttgtctatcctaccaaatctaacgggcaaccacaatttcagaaaaataactttttgatgacaaaataaaaaatcccgccggatgacgggaaataagatactattttacaacacttaaaagctctttttgggctttccagccggattctgaacccgacgtttccagttctttcagcgcttggagcacggcctctttctgctttttgtcagcggcgtctgcgccgtctgccgcttttgccgcttcagctacttccgtttttgaaagatctttgccggtaatcgctttggcggagagctcagatgcttgtttaaaagagtctttcagccctgaatcgaccgcaaagctgagctcttttccgccccaagcctcaaaatcatggtctatcagcgtctggcccaattgctgtgataagcttttttccgcggcaagcccggcgatcacataagtgtacccgtcttcttttgccaaagaaacggccgagtatcctttttcagtcagctggtcaacaagcgtcttcgctcctttttctgatgaaaattttccggcctgcaccgcatatgttttatagtttccctctgaagattccgcatctcctgtgccggctgtttcagatttgtctttagaaacatctcccgctttcaccgtctgcccttgtgaacctttgtcagctgatgctggagcggcggcttctttacttcccgacatatttaaggcgacaaggccgagcccggtgcctaaaacagccgcaacggcaattgtcgtgaccgcttttttaactggagaagacggctgctttttttgcggaaaatgagggcctgtttttttcttctggtatggcggcacgactttcgggtcatcttcaaatacctcagaattcttctcatgatcccaattgaaatcttcttctttcggatcttcatgggaggcggcggtctcctgctccgccttttttgtttcttcccaattggaaaatgtgacggtcttctccccgccttcattcacatcttcttgtccatacatcgtttcttcttgtccgttaatggttactttaagggcattgtttttggctttgctgtgctttttgctcttcctttttttcaacgtctcttcccccttgcattcgtcttggccgtaccttgaactgatcatggttcacactttagcataggcgtaaaaaaaaagaacaagacttttgtcgtcttgtccaaaaaacgttcgccaaattttttaagctccgcctgaagcgagcttgatgtaaaacgaaaacagctcttcaccgtataaataactcaaagcgctcccggctgagatggccggcgcaaacggaaatggctgctttttaccaagcctgccccgggctgcggcgcacatgccgtatacggctccgatcataacggaaagaaagaatgcaatgagcacgagcttcacgccgagcgtcaggccgatcaccccaaacagtttcacatcacctgcgccgatgcctcctttactgacaaacatgataaaaacaagcagaaaaaatccgcaaacggctccggcaaaccctgcataccatgaatccagcggagaaaacatgcggccggcgatgaaaagcggaagaaaaaacagcagaactttgtcaggaatcagcatatattgcagatccgtcatagtaacaatcatgagcagagacagaaataacagcgcgactaacagttcttttgagaaaccgaaatgaatgcctgcagccgtgaataaacacgccgtccagcattccgccgccggatacataaccgacagctttgcacggcagtttctgcatctgcctctttgcagaatataagaaacgacgggcacaagctccccccaggagagcggcaagcggcaaaacgaacaggctgaacgcggcgaaataaccgagattcgaagcgggatacggcacgctgctgtataaaaaaaagaaccgaaaatcaaaccgagaaaaaacagaatcaaaagcactcagaccacacctttactatcaatctggctcagattatagcaaagaaaaacaccatgactgaaatggctgaaaatatattttcagcataaaaacacccggcaaaacctaaaaagggtctgccgggcatccgaggggctgtcagataagccgctttctcatttctgaaataaaatataaggaaccggtaatgatgatgacatcatccgccccgtctttttgttctatccattctttcacactgtccgggttctcatcgaagctcttatccgctagactgcttgcgttataaagggcttcggcgcttgaagcacgcggaaagtcaaatgatacaaagtgaatggagtccgtttcggtttccagctttttaatcatttcctgatacggtttgtcttttaatgcgctgaatacgacatgaacgtttttatcggcaaagcgctgcctgatcgtttctgtcagtgtgtcaacaccttcttcgttatgtgcgccgtccgcaaacactaaagggcggttttgaagacgttcaaaccggcccggccatgatgcttttttcagtccgtttcgcattgcttcttcagaaatcgctgcggctcccagacgattcatccattcagcggccaatatcgccaatgccgcattctgcctttggtgaatgccgatcagcgacgtttgaatgttttcatagcatttcgtttccgtttccagcgaaaagctttcaccggacggaagcgccgcttcattaaacagtctgcacgttttatatagtgactgatacggagcctgctttttttcggcttccgcttcaataacgccgagtgcttccggctgattgacgcccgtaatgaccggaatggaatttttaatgataccggctttctgcccggcgatctcctcgatggtattgcctaaaatcgccatatggtcatgtccgatacttgtaatgaccgacaggagcggattcacaatattggttgaatcaaatgtgccgccgagccccgcttcaaaaatgacaaaatcgatatcagcccgcttcgcaaaatataaaaatgcacacgctgtaatgatttcaaattctgtcaccgttccggcatcggtcttatcaagctcatcgactatcggttttatgtcattaacgagtgttctccattcctcatcagaaatcggcgtgccgttgacgctgatacgctcattaaacgtaataatgtaaggcgatgtaaacgtgccgaccgtataaccggcttcttgaagcacggaacggataaaagcgacggtcgatcctttgccgtttgtgcccgccacatgaatagcgcgaatgttcttttccgggtgttccagtttttccatcagcttttccatacggagaaggcccggcttaacgccgaacttgagtctgccgtgaatccagctgatcgcttctttgtacgtattaaacaatgaaatcccctcttttatacgacaaggcggtttcttaggaaaccgccccgctgttttatcagcctttcagctctgcaatccgctgccggacagcttcgcgttttgccgtgtagtctttctcttttccgcgttcttcttcaatgacatgctcaggagcttttttaatgaatccttcgttgccgagttttttctgaacgcgttcgacttcttttgtcagcttgtcgaattctttttgcagacgggcgatctcctcatcaatgttaatcagcccttcaagcggcagaatgacttccgctccggtgacgaccgctgtcatcgctttgtctgctgcagtgatatccgtcccgattttcagcgtgctcggattcgtaaagcgttcaacgtaagaacggttcttctcaaggcggccggcaatgtcttcggtagctgttttaatgtaaagctcaacctgcttgctcatcggcgtgttgacttcgctccggatattgcggacagaacggattaattcaacgagcagtttcatatccgccgctgcctctttatccgtatgctccggcaccggaaccggccaagagctgatcgtgattgactcgccttcatgaggaaggtgctgccagatttcttccgttaagaatggcataaacgggtgaagaagacgcatcgtctggtcaagcacgtatgccagaacagaacgggttgttttcttcgccgcttcatcttccccgtacagcggaagcttcgccatttcgatataccagtcgcacacatcgtcccagataaagttgtacaggtggcgtccgacttcaccgaattcataacgatccgcaagctgtgttacgtcttctatcgtttcattcagtcttgtgaggatccacttatcagcaactgatttttcaccggacagatcaagctcgtcatacgtcatgccgtccatgttcattaatgcaaaacgggaggcgttccaaattttatttgcgaagttccatgtggattccactttttcatagctgaaacggagatcctgtcccggtgaacttccggttgccaggaaatagcgcagggaatccgctccgtacttgtcgatgacatccatcggatccacgccgttcccaagggatttactcatttttctgccctgctcgtcacggattaagccgtgaatcagcacgtctttgaacggacgctcgccggtaaactcaaggccttggaaaatcatccgggatacccagaagaaaatgatgtcatatcccgttacaagaacatcggttgagtaataccgcataaagtcttcagcgttttcatcaggccagcccattgtagaaaacggccaaagcgcggagctgaaccatgtatcaagcacatctgaatcctgttcccaattttcgctgtcttcaggcgcctcaaggccgacgtacacttcttttgtttctttgtgataccaagccgggatgcggtggccccaccacagctgacgggaaatacaccaatcacggatattttccatccagtgcaggtacgttttctcgaaccggtcaggaacgaagtgaactttctcttcttttgactgaaggtcaaccgcagcatcggccagcggctgcattttgacaaaccattgtgtggacaggtacggctcaacaacggcgccgcttctctcactgtggccgacagaatgcatatggtcttcgattttaaagagaacgccggattcctgaagatctttgacgagttttttgcggcattcaaaccggtccatgccgttatattgcagcgctttttcattcattgttccgtcttcattcatgacgagaatccgctctaaattgtggcggtttccgagttcaaagtcattcggatcatgggcaggcgtgattttaacggcgcctgatccgaattccatatcaacataatcatcgccgacgatcggaatttcgcggtttgtaatcggcagaatcaccgttttgccgattaagtgcttgtagcgctcatcttcaggatgaaccgcgacagccgtgtcgccaagcatcgtttccggacgggtggtcgcgatttcaattgagcctgaaccgtctgctaacgggtagcgcaaatgataaaacgcgccctgtacgtctttgtaaatcacttcaatatcggataaagccgtttttgtggcagggtcccagttgatgatatattcgcctctgtaaatcaagcctttctcgtacaacttgacgaatacttcccgcacggctttgttcagcccttcatcaagagtgaaacgttcacgtgaataatcgagtccaagtcccatcttggcccattggctgcggatgaaatcagcatactcttccttccacttccacgtttcttccagaaacttttcacggccgaggtcataacggcttgtgccctgttcgcggagtttcgcttcgacttttgcctgagtggcgatgccggcgtgatccatgcccggaagccagagcacgtcatagccctgcatgcgtttcatacgcgtaacgatatcttgcagcgtcgtatcccacgcatgtccgaggtgcagcctgcccgtcacattcggcggcggaatgacgacagaatacggctgtttcgtttgatcgccgcccgcttcaaaatattttcctttcagccaaaaatcatagcggcctttttcaatcgcagacggatcatattttgtcggcattgtttgttcatttgtatccatgataaccctccagcatgtttagaaatggctgagcaactaaaaaagagccttcatcctgataaaggacgaaaagctctttcgcggtaccaccttttttcatgaacagatttgttcatgcacttaaacggataacgggtgcggcccgaatttctctactgtatgttcaagaaattatgctcccgggcgaccttccaatgagacggcataagaagcctttcagcacagtagcttctctctcttcatgcgtctttcttgtactcttcccgttcaaagcaggtgtatttatatcagctcatgatcttatttattatgttctttattatagtaaaagtgtttttgattcgtcaatcatcttttccaaaaaccgctgccgtcatacataaatgggcatgcaccccgccctttcccttacatacgatacatagaaaggcgaatgtgaggaggaattgcccgtgagaaaaaaattcaattcttattcgctcccccagtgggccagacaggtccgccttgtatccgcgcaagtcataatcccgattacgatctttcaggggatcaggacgattttctttccgaccacttttgatgtcctgctgcttgccatcctgctgtttttagcgtgcgccctgcatttggaatggatataaaaaaacgagtcccgttatgaagaggactcgttttccgcttttatttttttctcccgttcaatctgatgaaccttcatgagaaaaggctcaacatttttcatctgccaaaacgctcttaataattgcgtgcactcttctttttcagagcccctttggccggtctgataccgtttcagcactttgtacatggcggatggataagccatatagctgagaaacaggctgatttccgcttcacggagcgggaatgatttgtgatacgtataaaaccagtccagacattccgggcatgctttcggatagcttctgaacattctggagtaaaagccgagcaggtcattttgcggagggcccagcgcagctttctcgaaattcgtgaaaaagcccgatcccgcatcattatacagaaagtggcggctcgataagctgccgtggttgatcaccgctctcgtcttgtcatgatcctttgccgcgtcaaaccattcttccagacgttccagagcaaaattgacggcggaaaccgtttctgtaagatacgtaacagcctgcagttcaaaaggtgaaagataccactctttttccgcccggtcggcgaattgttcatagacaagcttatcattttcccaatctcttttcgttgcttcataaaagccgctgatatcttcagtccggatttggatgtcccgcacagtcgcagaatggagcttcgcgacctctttaaaaaggtaaacatgtttttgatcccgttcctcttcctgatcgtactgaagccaaggcattaaataataagaattctccgtctgtcttcccgcaaaaaaatcgccggcatacgtgcggcagatcggcacaaatgatcggtagcctttctcctcaatctcaatcataagatccgtaaattcactgctgcgggccggcttgagctgtttcaaagcaaaaatgccgtagtttgagtagaccttccaaacatgcgggctgacaggctcaatatactcagccgccagcccgtattcctgaagcactgattggactgcttccattccattcaccacatttttacggcctctttgtgcttacgcatggctgttattatattcaggtatatacagaagctgaccttcttcaagctcgtcatcaaacgataaagcattcgttctgatgagctgctgggatgttatgtcatatcgttcacacacccggtcgatagtatcttgctgctgtacgatacaaattttcattcttgaaaacttttcttcttcccttgtaaataattttgtcaagtaatgagagttgtcattttccttctgctcggttcccggtgccgcttcttcattctttctttcaggcttaagcggctcaggctgttcagcttgcgccggctcctcaggcggcagtttggaaaactgaaatgacaaatcgagaggcttcccggtttcctcctccggcggcgccatcttccttacctcaatttcaaacccttcttcatcctgagcctcttcttcaagcagcttaggagcgctgtaaaactcctcttcctgctgttccggaacgaactcgcgataaacgggcgcctgctcttcttgaaaaaccgcaggctcatcttcgtcttctgccgcctcatgatcgctctgacggagaagcggctcggcctctggctgctcttctttttgaaggaagggctgttccgcaatttttggtttttccgcatgcggagtcagagtgaacgcagggaaaaccggttcgatatcatcttttggctcttcctggacttctgctgaatcatcctcaaatacaggttcattcctcacagccgacatgattgcaggctcctcagcttcttccggctcttcttcgtgttggaaggaaacaggaggaggaggctcagtaaaggaaacaggtttcggcacctcttcctgctccctcagaatcggggcagtttcttgctcttcttcttcctgctctctcaaaatcggggctgctgcctcctcctcttcttcccgctccctcagaatcaggg

SEQ ID NO: 27 - DNA, 201566 bp, Bacillus amyloliquefaciens
cagcccgcgggctgatttttttattgaaatcgtacaatttcgacagaaaacaggctatactaggacaaaagacagcgagattgggagagaagcaatggagccttacgaaacttttatcaccaagtggaaacaaataaccggcgttgatttatctttatacaaagaagcacagatgaaaaggcggctgacgtccctttatgaaaagaaggggttcagagattttcaggaatttgccgccgctttggaaaaggacaagcttttattaaacgaaacattagacagaatgacgatcaatgtttctgaattttaccgaaattataaacggtgggaagttcttgaaacctcaattcttccgttaataaagcataacaaaccgttaaaaatatggagtgcggcctgttcaacgggagaggagccctatactttggctatgattctcaatcagcagacgggactggccggatttgatatattggcgacagatattgatgaaaaggcgctaagcaaagccaagcggggcatctatcaggaacgctcgctgcaagaggtgccggcttccgtgaaaagccgttatttcaccaagcaggctgacagcagttatcaagtaaaacaagagattcagaacaacatccggtttaagcggcacaacctgcttgccgacagctatgaacaggattttgatctgatcgtctgccgcaacgtctttatttattttactgaaaaagcaaaagaagagctgtatgtgaaaatggcgggcagtctgaaaaagaacggaattctgtttgtcggcagtacagaacaaattttcagcccggaaaaattcggccttgagagcactgatacatttttttatcaaaaaagatagaagacatttaatgaaaacttgtggtatagttttacttaaaagcgttaatgcgatgaagggagaagaaagaaatgagatacttaacagccggagaatcacacggtccgcagctgacgacaattatagaaggtgtgcctgcggggctttatataactgaagaagacattaattttgagcttgccagacgtcaaaaagggcacggccgcggacgccgcatgcagattgaaacggacagagcgaagatcacaagcggcgtgcggcatgcccggacactcggttcacccatcgcgctcgttgtagaaaataaagattggactcactggacaaaaatcatgggcgccgcaccgattacagaagaagaagaaagtgaaatgaaacgccagatttcaagaccgagaccgggacacgcggatttgaacggtgctattaagtataatcaccgtgatatgagaaatgtgttagaacgatcttccgcgcgtgagacaacggttcgcgtggctgccggagccgtcgctaaaaagattttagcggagcttggcattaaagtcgccggacatgtcctgcaaatcggcagcgtaaaagcagagaaaaccgattacacatccattgaggatctcaaacgggtaacggaagaatcaccggtcagatgctacgatgaagaagcaggccgtcaaatgatggcagccattgatgaagcgaaggcaaacggcgactcgatcggcggaatcgttgaagtgatcgtcgaaggcatgccggtcggtgtcggaagctatgtccactatgaccgtaagctggacagcaagctcgctgctgccgttctgtcgattaacgcgtttaaaggcgtagagttcggcatcggttttgaagcggccggcaaaaacggcagtgaagttcatgatgaaatcgtatgggatgaagagaaaggctatacacgcgccacaaacaggctcggaggattagaaggcggtatgacgacgggaatgccgattgtcgtccgcggcgttatgaaaccgatccctactttgtacaagccgctgaaaagcgtcgacattgaaacgaaagaaccgtttacagcgagcattgaacgttcagacagctgcgcggttccggcagcaagcgtagtggctgaagcagcagtggcctgggaaatcgcaaatgcagtcgtcgaacaattcgggcttgaccagatcgaccgcattaaagaaaatgttgaaaacatgaaaaaactatcgagggaattctgatgaaagagcttgaggttcggacagcttcctccgcatatcccgtgtatatcggtgaaggcataaggaaacaggctgctgcccttttgtcttcactgaacaggccgctgacaaagatccttctcatcatcgatgctgaagttgaccggctttacggtgatgagatgttccggcttttaaacgaaacatggcccgtgaaaaaagtgatcgttccaagaggagaagaagcgaagtctctaaaagagtatgaacggattcaaacggaagcgatcgctttccatatggaccgctcctcatgtatgatcgccttcggaggcggcgtgacgggtgatttggccggcttttgcgcagcaacttttatgcgcggaattgatttcattcaaatgccgacgacactgcttgcccatgacagcgcggtcggcggcaaggtggccgtcaaccataaactcggaaagaacttaatcggcgcgttttatcagccgaaagcggtgatttacgatacggagctactgaaaaccctgccggaacaagagctgagatcgggcatggctgaagtgatcaaacacgcgtttatcgccgatcatgcttttttagaaaaacttctcacatttgacacgttgcaaggactgacaagcgctgagctgaatgaaatgatttataaaggaatttcaatcaaatcggccgtcgtgcgtgaggacgaaaaggaagaggggataagagcttttctgaatttcggccatacgctcggccatgccgttgaggcggaatacggctacggccggattacacatggagatgcggtcgccctcggcatgcagtttgccctttacgtgagtgaacaggttgcgggttgcaagatgaacaggaaagaactcacacaatggctgattgggctcggctacccgggaagcatcagacaagatattgaaacgccggttctctccgcccggatgatgaatgataaaaaaacgcgcggaggcatgacacagttcatcgtgttaaaagaattaggcgaagcgcgggactgcatgctttcaaaagatgagctcgaaaaattgctgaacaaatggcgaatggaggaaacagcatgatgatacgcggcattcgcggagcaacaacggtggaacaagacaccgaacaagaaattttagaaaaaacacagcagctgcttgaaaaaatcattgaacaaaatggatgcaagccggaagacgttgtacagatcctgttatccgccacgcctgatatccattccgtatttccggcaaaagcggtccgccgcctttccgggtggcagtacgtcccggtgacgtgcatgcaggaaatggatgtcaccggcgctctgcaaaagtgtatccgtgtcctgatgacggttcagacggatacgcctcaggatgaaatcaagcatgtctatttagaaaaagccgttgtgttaaggccggatttatcattgacaaaaaatactgacatgtaatacgataaacaaagcttagaaatacacaagagtgtgtatagagctggtaagtaagatattgaacagttgagtttagaatagggtagcagagaatgagtttagctgagctgagataaacacgtttttattctgcccaaaagaagcctttcttttgggtttatttcttatacgcaagactcctctcactcttcatctcattctccttaccgtaaggaggagaatcatgaatttacaatcggatgtttctttatttttaaaggacagtctgacacaccgcaccattccaatcgcagagacttttacggtcgacacgatcacacccattcagatggttgaaaaactggacagaaacattacgtatcttttagaaagcaaggatgagtcgtcaagctggtcgagatactcttttatcggcctcgatccttttatcacgattaaagagagtcataacacattcactgccgctgatccaaacgggcatacgctgtttgaagccggagaattaaaagccgtgcttgactggatgaatgagagcttccgcattaaaacaccagagcttgatatcccatttgcgggaggggcggtcggttatctgagctatgacatgattcctttgattgagccttccgtgccaagccacgcgaaagtaacagatttcgaaaaatgcatgctgtttgtctgccggaaaatcatcgcgtacgaccacgaaacgaaacaagtgcatttcattcagtatgcggagcttaacggccgggagacggaggaagaaaagcgggccgtttttaaagaaaattgcgcggagcttcgtaagcttatcggtattttgacagaatcgaaagatatgaaagagccgtttttttctaaagaaacgtttgacacgccaagttttgccgatgtgacatccaattatacaaaagaagagtttatggccggtgttaataaactgaaagaatatataaaagcgggagacatttttcaaggggtgctttcgcaaaagtttgacattccggtatccaggcattcatttgagctgtacagggtgcttcgcatcatcaatccttcaccctatatgtactatatcaaactgcctgacagagacattgtcgggagttcgcctgaacgtctgatccgcgtgcatgaaaggcatctggaaattcatccgattgccggaacgagaagaaggggcgccggaaacgaagaggacgaacgcctgaaaaaagagctgatgaatgacgaaaaagaaaaagctgaacattacatgctcgtcgatcttgcgcgcaatgacatcggcagagttgcggagtacggttccgtagccgttccggaattcacaaaggtcgtttctttttcacatgtgatgcacatcatctctgttgtaaccggccgtttaaagcagggcatccatcccgttgacgcgctgatgtcggcattcccggcaggaacactcacgggcgctccgaaaatccgcgcgatgcagcttttaaatgaattagaaccgacttccagagaaacctacggcggatgtatcgcttatatcggatttgacgggtcaattgattcgtgtattaccatccgcactatgagtgtcaaaaacggtacggcgtcggtgcaggcgggcgcgggaatagtcgccgattccgtcccggaagccgaatatgaagagagctgtaacaaagcgggggcgcttttaaaaacgattcaaatcgcagaagacatcttttctggcggggaggagaagacggatgaacaaatttctgcaatcgtgcgttaatggccgtacgctgaaaaccggagaagccgaaaagctgatggaaatgatgatgaacggggacatgtcgcagtctgagatcggcgggattttatcggtattagcccaccgaggtgaaacggcggaggagcttgccggatttgtaaaagtgatgcgggcgcgggcacagacatcaggtggcttggcggatgtcgttgatacgtgcggaacaggcggagacggggtttctacgtttaacatatccacggcagcggcaattacagcttctgccgccggagctaaagttgccaagcacggaaatcgctccgtttcgtctaaaagcggcagcgcggatgtgctggaaaagctgggggtttccattcaagccactccagacagcgtcaaacgcagcattgaaatgaaacaaatggggtttttgtttgcgccgctgtttcattcgtcaatgaagcacgtcgccgccgcaagaaaagagcttggcttccgaaccgtatttaatctgctgggcccgctcagcaacccgctgcaggtgaagcggcaggtgatcggcgtctattcatttgataaagcgcgcctgatggcaagcgctctggaacaatttgatgtcagacacgtcatgcttgtgtcggcccgtgacggattagatgaattgtccatctcagcaccgaccgatatcattgaactgaaaaacggtgaacgtctggaatattccgtttcacctgaacaattcggttttacagaaggttcactaaaggatattcaagtgagttcatcggaagaaagcgcgctcctcattcagaatatttttgcaaataaagctccgtcatccgctctgcatattaccgccttaaatgcgggcgcggccatttatacggcaggtcttgcaaacgatctgaaagaaggaacgaaaaccgccatagaagcgattcaaaacggagatgcccaaaggcagctcgaacgtctgaaacagaaagaggaagaaatgtatgcttgatcaaatcattcagcagaaaaaagaagaaatcaaatccatcgtgctgccggaaacctgtcaaattgaacggagatcctttaaaaaagcgctcctgaacccgaaccgttttatcgggctgattgccgaagtgaaaaaagcttcgccgtctaaaggattgattaaagagcattttgttccggaaacgattgcggcggattatgaagcggctaaagccgacgccctttcggttctcacggatacccgtttttttcaggggagaaatcaatttctgacagatgttaaacaaaccgtgtctcttcccgtgctgagaaaagattttattattgattcccttcaggtggaggaatcgttcaggatcggcgccgatgccattctgctgatcggggaagcgctggaaccttcagagcttcatgagctttatctggaagcccgcgagaagggcatggacgttctcgttgaaatccatgatgaaactgtgcttgaacggattttacaagtgtttcagccggacattctcggcataaacaaccgggacttaaaaacgttccgtacttctgtttcgcaaacggaaaaaatagcgcagcttgtaccggacggctgcctgctggtcagtgaaagcggcatcggttctttggctgacctgcaattcgtcaacaagcacggggcgcaggctgtattggtcggagaatccttaatgagagaggattcgcagcaaaaggcgatccgcggactgttcggggagtgacgacatgaaaaagcctgagttaaagtactgcggaatacgatcgaagcatgattatgaacttgcggcagcttcagaagcggattatctgggatttatttttgccgcaagcaaacggagagtaacgccggatgaggtccggaaatggaaagagcaggtccggacagacaagaaacatgtcggagtatttgtaaatgaaacgatagaaaacatcgtgcaaatcgcctctgatctggcacttgacgccatccagcttcacggtgatgaatcgcctgagcatgcccgccgcctccgtccgcttgtgcgctcggagatatggaaagcgctccatcacggggaagggacgcttcgtcagatggctcaatttgcacctgctgtcgacggctatgtcattgactcttcagtaaaaggaatgagaggcggcacgggaatcgcgttttcatgggcccgtgtccccttgtaccgaaagcaggctcaaaatgcaaacaagcgctgttttatcgcgggcggcgttaatcctggaacgattacaggcttactgagatcgcgtccgtgcggtatagatcttgccagcggaattgaaaaaaacggacaaaaggatcaaacactgatccggcttttagaagaaaggatgaatcactatgtatccatatccaaatgaaatcggaagatacggcgaattcggcggcaaatttgtccctgaaacattgatgcggccccttgaggaaatcgaaacggctttcacagaattaaagaatgatcctgttttccatgccgaatataaaaaactattgtttgattactccggaagaccgaccgcattaacgttcgcagacagggtgtcagagtatttgggaggggcgaaaatctatctgaaaagagaagatttaaaccataccggctcccataaaattaacaacgcgttaggccagattctgcttgccaaaaagatgggcaaaacgaaaatcatcgccgaaaccggtgcgggacagcacggtgtggctgccgcgacagccgccgcaaaattcggttttaagtgtacagtttttatgggtgaagaagacgttgcgcgccagtcgctgaacgtattccggatgaaactgctcggcgcggaagtggtgccggtcacaagcggaaacggcacgctgaaagatgcgacgaatgaggcaatcaggtattgggtccagcattgtgaagatcatttctatcttatcggttctgtagtgggtccgcacccatatccgtatatcgttcgcgaatttcagaaaatcatcggcgaggaagcgaaagaacagcttcgccgggttgaaggaacgctcccggatatggttgttgcatgtgtcggcggcggaagcaatgcgatgggcatttttcaggcctttttagacgaagatactgagctgatcggcgccgaggctgccggaaaaggaattgatacaccgctgcatgcggcaacgatcgcaaaagggacgctcggggtgattcacggttcaatgacctatttaatacaagatgaatacgggcagattatcgaaccgtattccatttcagcaggccttgattacccggggatcggccctgagcacgcctatctgcataaaagcggccgtgtaacgtacgaaagcgtgacagacgatgaagcgattgccgcgttacgtctgctttctgaaacagaaggtattcttccggctattgaatctgcccacgctctggcaaaagcgtttgaaatggcaaaagacatggataaagacaaaatcattctcgtcagtttgtcgggaagaggagataaagatgttcatacgctgatgaatgttttggaaaacggggtggagacacatgtttaatctgcgagattctgaaaaattatttatcccttttattacagctggcgatccgcttcctgacatttctgttgagctggcaatatcattgcagaatgcaggcgcttctgcccttgaaatcggcgttccttacacagatccgcttgcggacggacccgtcatacaacgggcttcaaaacgggctctggaaaacggaatgaatatcgtaaaaaccattgaacttggcggcaaaatgaaaaaaaacggcgttcatattccaattatcctctttacgtattataatcctgtgttacaattagaaaaagaatactttttcgctttactgcgggaaaacgacatagacggtctgcttgtacccgaccttccattagaggaaagcgcccttttgcaaatgacatgcaaaaaggagaacatcgcttatatctcactggttgcgccgacaagtgaagaccgtttgaaaataattactgaacaggccagcggctttgtgtattgtgtatcctctttaggagtgacgggcgtacgcagcgaattcgatccgtctgtatactctttcatacgtaaggtgaaagaattcagctctgttccggtggcggtcggttttggcatttcaaaccgcaaacaggttgacgggatgaatgaaatatctgacggtgtcgttgtcggcagcgcgcttgtcaaaaaagttgaagagcttaaaacaaagcttgtgaatcccggaacaagagctgatgcgcttcttgaatttgaagaatacgcaaagacgttcggacgactgtacagtgtaaaatgaggtgactggatttgcagattaaagaacagctgcggcagctgaaaccgtatcagccgggcaaaccaatagaagaagtgaaaatggaatacggacttgagaaagtagtgaaactcgcttctaacgaaaatccgttcggctgttcacaggccgctaaagatgcgctgcatcaggagattgagcagcttgcgctgtatcccgacggttacagtgccgctttgagaacgcggctcagtgagcatctgcaggtcagtgaatcttctatcattttcggcaacggctctgatgagcttgtgcagattatctgccgttctttattaaatgatcaggcaaacacgattaccgccgccccgactttcccgcaatacagacacaatgcggtgattgaaggcgctgaggtgcgcgaggtgccgctccgcagtgacggcgctcatgatttggaccggatgctggaagcaattgacggcaagacgaaagtcatatgggtatgcaaccccaataatccgacggggacatatacttctgagcaagagctaattgcctttttaaacagagttcccgagcatatactcgttgtacttgatgaagcgtactacgagtatgtcacggcggaagattacccagaaagcattccgcttttaaagcaatatgcgaatgttatgatcctccgcaccttctctaaagcgtacggacttgccgcgctgcgcgtcggatacggcattgcggacgaagcgctgatccgccagattgaaccggcgagagagccgttcaatacgagcagaatcggtcaggcttcggcactggcagcgcttgatgaccagacatttattcaggaatgcgtcgagaaaaatcaagcaggccttaagcagtattatgattttgcagaaactcacggattaacttgttatccttcacaaaccaactttgtgctcattgattttaaccgcccggcggatgaactgttccaagccctgttggaaaaaggatatatcgtccgctcaggacaggcgctcggatttccgacagcgttaaggattacggtcggtacgaaagagcagaatgaggaaattctcacaattttagctgaaatattataagaggtgatcaagcatcacctctttgctctattaaaatagttgaaaaaggaaatgagtgaaatgaaggatactatattgcttgcggggatcgggctgatcggcggatcgatcgcattggccatcaaaaaggagcatccgcataaacggattatcggtgtagatatttcggaagaacagctcactgccgcgctgaagctcggaattattgacgagcgggccggttcatttacggaaggggcgcagcaagcgtctgttgtcattatcgccacgcctgtcgcccaaacgctgaaaatgctcgatgtgctggccgcatcagacatcacccatgaactcctgattacggatgtgggcagcacgaaacagaaagtcgtcagctacgccgacaaagtgcttccggctcactatcaatttgtcggcggccatccgatggcgggatctcataaatccggggccgctgccgcgaaagaatttttattcgaaaatgcgttttacattttaacacccggaaaatcaacttctaaagagtcagtaatgcatctgaaggaactcttgaaagcggcaaacgcccactttgtggagatgacccccgaggagcatgacggcgtaacgagcgtcatcagccatttccctcatatcgttgctgcaagcctcgtacatcaggctcatcatgctgaagaagattatccgtatttgaaacgtttcgcagccggcggttttcgggacatcaccaggatcgcctcaagcagtccggcgatgtggagggacatacttcttcataacaaagataaactgcttgaccgcttcaaagaatggaaacgggagattgacacgatcgaatcttatgtagaaaatgaagatgcgggcagcctgttcggatattttaaaaaagcgaaagattatcgcgacggtctgccgctccgtcaaaaaggagcgatcccgtccttttatgacctttatgtcgatgttcccgatcatccgggggtcatttcggaaattacggcgatattggcagaagaaaaaatcagtattaccaacatccgcattatcgaaacaagagaagatattaacggaattctcagaatcagtttccagactgatgatgaccggaaacgcgcggaaacctgcattcaatcccgcgccaaatatgacacattttacgctgactgaggtggaaaacattgaaaagagaaaaagtgacgtctttaaacggtgaaattcatattccgggggataaatccatctcccaccgttctgttatgttcggagcgcttgcggaaggaacgacaacggtaaaaaactttttgcctggagccgattgtctgagcaccattgcctgcttcaaaaaaatgggtgtctccattgaacaaaacggaagtgatgtaacgatatacgggaagggcattgacgcactttgtgagcctgacagccttcttgatgtcggaaattccggcacgaccatccgcctgatgctcggcattttagccggacgcccatttcacagtacggtagcgggcgacgaaagtattgcaaagcgcccgatgaagagggtgacggagcctttaaaacagatgggagccgcgattgacggaagagcggacggaggatttacgcctttatccgtaagaggcggacaattgaaaggcattgattacgtctcccctgttgcaagcgcgcagatcaaatccgccgtgctgcttgccggattgcaggctgaagggacgacgaccgtcactgagcctcataaatcaagagaccatacggaacggatgctgaacgcttttggcgccgagcttgcggaaacggagacgagcgcttccgtaacgggcggtcagaagctccggggagttgatattttcgtgcccggcgatatttcttcagcggcctttttcctcgcggcaggcgctgtcgttcccggaagccggattgtgctgaaaaacgtcggcctgaacccgacacgcacgggaatgattgatgtcttaaagcaaatgggggcttcacttgaagtgattccttcagaagcggacagcgcggagccttacggagacctggttattgaaacttcagatctgaaagcggcagaaatcggcggagaaatcattccccgtttaattgacgagatcccgattatcgcccttttggcaacgcaggctgaaggcacaactgtcattaaagacgctgcggagctgaaggtgaaggaaacgaaccggatcgacaccgtcgtatcagagctccggaaaatcggcgcagacattgaaccgactgaagacggcatgaaaatacacggcaaaaaaacgcttgcgggcggagccgatgtgtcaagccacggcgaccaccgcatcggcatgatgctcggtatcgcttcatgcctgacagaagagccgattgacatccgtgatactgaggcgatccacgtctcatatccgacattttttgagcatttagatcaattagccaaaaaagcctgaagacgattcttcgggcttttttcttcatgtgtcataaaatcttgggctttgacatagcttgtcttaaacagaaaataacagaaagggggaatgcgttttcgttacagaaacagccggaacaaattgcgctgtctgcgtataaagatgccgtccccttttttgccgttttcctcttaactattttctgataaactataatgccgggtgaagcatcttatttgcgggcaggccctgtctgaattatgataagaataacccgaataaaaacccttttcattggttgatgaggtataggaaaagaaaggaccggtctgatttgaatacattgattcaagaagccataaaattagttgaagcaggtgaaaccgaaaagggactcaaagcgctttcaaaagctgaaacagagcttcatgacgaagacaaagccattgcagcccagctctactatgaatggggaaacgccgaaaaagcgttagcgctgatcagtgatctgcatgacctttatccggatgagtctgagctgacgaatttttacgccgaattgttaatagatattgatgaagaagaaaaagctcttgaggtgctggagacgatttctccggaagacccgtcttacgcggaaagccttcttttaatggctgatctgtatcagatgcagggcttatttgaagtaagtgagcaaaagctgttacaggcgaaagcgatgttacaagatgaacctgttattgatttcgctctgggggaattatacttcactcagggatcatacgcaaaagccgttccttactatgaagagacggcaaaagaacggcacgaaatcggcggcgtaaatgttcatcagaggctggctgagtcattgagcgcggcgggtgaatttgaggaagcgatttcatggtatgaaaaagcggtggcagaacatacagaaccgaatacgattttcgggtacgggttcacagcctatcaggcgggaatggtcaaaacagccatcaagcagctgtctgatttaaaagggcttgatccttcctattcatcgctttatatgccgcttgcaaaaagctacgaggcagaaggcatgtatgaagatgcattaaaaaccgctaaagaaggtattacttacgatgaatacaataaagagctttttctctatgcggcgaaaatggcgttaaagctcggcaacgaagaggaaggcaaaaagcttcttcaggaagcgctggcgctcgatccgggttacgtggaagcgctccatacgcttttagccgtctatcataaagaagaaagctttgaagagattattgatctgattcaggaagtccgcggctacggagaagaagatccgaaatacaattggtatttggcgggtgcttatacaggccttgagcaatacgctgaagcgaaaaaaagcttcgaagctgcgtatctccattatcaggatgatcgggatttcttatatgaatacgctcacttcttattggaagagggtctccagaaagaagcgctgccgcttttaaaacaggtgctttcaatggatggaacaaacgaagagcttgaagaaacaatcttacggatagaggatgaatttttaagataagcaggattttggaccatgcttgctgaatgtataagtgatgtcagattatacgatcgatagaggagggaattacatgcagacccctgtttctgtcaatgaaaaaaaggattttatccgttggtttttaaatcattatcagcttaaacgccgggagtgcgtctggattttaaattatttaatgagtcatgattcattaatggaaaaagtccattttgtagaacaagctgaattttgcccgcgaggcattatcatgtctactcattgcgttgatgaggtgccgtttaggttttacaaagaaaatgtcatgaccacggacgcggaaaaatcttttcacgacatccggttaaataaacagcaggatttatttatccagctgaatttccgttcggcctacagctcaccggaatatgccgctgttcttgaatcaaatccgcatctgccgaaagacctgtttgaaaataaacaggatcaggggatggctgaaaaaatattagaacatgccatttccactttccagcgggaaaagctgcttaaagatatcgacgaggcgctggaccgccacgacaaagaaacatttgaaaagctttcccgccaattgaatcagctcacataaatgacagccttgcagaatatgcaaggcttgttgcgtaaagaggaggaacgagacatgagatggagggccgctgatgccgatgcctatttacaatctgcggattacattgataccgctgtcattccgttaatttccataacgtcttcgggaggcttaaaagaggccgttgaacagggggaaagcactcaattgctttctgaagagcttgagcgccaattgaagggacgggtatatttattcccctcttatacatatgttgatatagaccaatcacaaatcgccctgcttcaaaaactcaaagaagaggtgatgaccaacttccggcacgccttgttcctgacggcagacgaaaaatggaaggattctgaaatagggtctgatgtcatatacatacctgccgttccgtttgaacatatgaaagactctttaaagagaaaaatagcggatgacaagtgcggagaaattttgaacgttttgttacagaagtggaacaattcttaaaaactccatacatcccgcaaaacacccgttttgcctctgttgaccttgctgaaagattcatatattatgagggtgtcaaatctctgaattattttctattttagttaatttttggtcaatctttagggggggaagagatgggcggaaaacaagatatatcgagaagacaatttttaaactatgcgctcaccggcgtggggggatttatggccgccagtgcgcttatgcccatggtccgttttgcgctggacccggtattaaaaccgacgggagatcaaaaaatggtgcaggttgtcagtgtggatgagctgacgaaggagccgaagcggtttgactttaaaattcatcaagtcgacgcctggtacgaatcggaagaatccaggtcagcctgggtttacaagcatggggatgaaattatagcgctttctccgatctgtaaacatttgggctgcaccgtaaactggaacaatgatcctaaaaatccgaacaagttcttttgtccctgccattacgggctgtatgaaaaagacggcacgaacgttccgggcacgccgccgctcgcgcctcttgaccgttatgagcaaaaagtaaaggacggctttttgtatcttggaaaagcaaagcctaggggggaagggtgacatgctgaataaaatttatgactgggtggatgaacgtctcgatattacgccgatgtggcgggatatcgccgaccatgaagtgccggaacatgtaaatcccgctcaccatttctcggcttttgtctattgtttcggcggtttgacgttttttgtaaccgttatccaagtgctgtccgggatgtttttaacgatgtattatgtgccggatataaaaaacgcgtgggaatctgtgtattatttgcagaatgaagtcgctttcgggcagattgtaagaggtatgcaccattggggcgcaagtttagtcattgtgatgatgtttttacatacgctgcgggttttctttcagggagcttataaaaagcctcgggaattgaactggatcgtcggtgttctgatcttttttgtgatgctcggtctcggttttacagggtatctgcttccatgggatatgaaggcgctgtttgcgacaaaggtaggtcttcagattgcggaggcgacgccattgatcggagcgcaggtgaaaactcttcttgccggccaccacgatattgtcggcgcccaaacgctgacgagattttttgcgattcacgtattttttctccctgccgctttgtttgcgctcatgggcgcccactttgtcatgatccgcaagcagggaatttcaggaccgctttaatcaaatctgatataaaagggaggggatgacatgcaccgggggaaaggaatgaagtttgtaggagattcaaggataccggctgaaaaaaaaccgaatataccgaaagactattcagagtatcctggaaagacagaggcgttttggccgaacttcctgctgaaagaatggatggtcggggccgttttcctcgtcggatttctcgttttaacgattgtgcacgagccgcctttggaacgggtggcggacccgacggatacagggtatattccgctgccggattggtattttctatttttataccagctattaaaatatgaatatgccgcagggagctacaccgttatcggcgcgatgattataccgggtcttgccttcggatcgctgcttttggctccgtttctcgacagggggtctgaaagaaggccgtggaagcgtccggttgcggtcggcatgatgcttttggcgctttgcgctacggtctttttaacgtggcagtcagtcgcgacgcatgactgggcgaaggcggaggagcaagggaaaatcaaaaaagaagccgccattgatactgaatcagacggttataaggtatttaaagaacaaggctgtatttcctgtcacggggataatcttcaaggcggaagcgccggaccgtccctggtcgataacgggctgagcccggaagaaattaaaaaaatcgccgtcaaagggaaagggcagatgccagccggtatttttaaaggaaatgacaaacagcttgatcagctggcgaagttcatttctgaaacgacagcgaaataacgtattgtgaagtagacaatagcaggatatacttttatgaaaagagctgaccggatgtcagctttttttgcatgatacatactttttacggactgagagttgatggtatgaggtggatttcttatcttttagggttgcgcggcatgcttctgcttgttcttgccgttaattttatcggtacggtgtacggctattattggtatgtgccgcagcttgcggacacgccgttccgatttctgatatttgtgcctgacagcccgacggcgacgtttttcttcctgttcgtgcttctggcatttctcatgggaagaaacgcgccgctgtttgaagcgctggctcttgtaacccttgtaaaatacggactgtgggcggtcggaatgaatgtctttgtgctggtcaaaatggggcagatgccttgggaagggtacatgctgattgcttcacattttgccatggccgttcaaggcgttttatacagcccgtattttcggttccggttatggcatcttgccgtcgccgctgtttggacgcttcataatgatgtcattgattatcttttcggcatgatgccccgctactcaatgctcaatgactatatgcaagtaatcggctatgctacattctggctgagcatattttcactcggccttgcatactatttggtgatttccaaaagacggataaagcttgacttacactgatagaatcttggtctaaccttgtcccgctcctcatattctgtaaagagaaggagtgggagggacctctatgaaacgaaagctgacgatctgtcttttacttgctcttatgtgtttcatcacaactgccaaagctgaagatgagggcggtctcaaggaactgaacgacctttcggataccgttttccagatgacgcggcattcgcagtatgatgaggctctgcaagtgcttggctactttaagaaaaaaatgacacacgtaaactcactgagcggcgccgaagtcaggcaggtgactctgggtttcaatgatttagtgcgcgttctgaaacaggcagacgcctcagataccgaaaaaatccgggctgccgcccagttcaggttggtaatggatgcgatggaagaccactccgatccgctgtggggttcgcttgaaagaccgattatggcgacattcagcgccttaaaagaagatgtcagcggaaacggaagtgaaaatttcaatgaaaagtggaatgaatttatatcattatatgatttaatttatcccagcctgacaatggatgtgtcggccggccagcttgatacggtggcgaaacatatcgaggtgattgagcaggacgggtttcagcagatgacaaaaggaacaaagcttgagcgtctgacgctcctgcagcaggatttaaagcgggtttttgacaaggtggagcgggatgacgctgacccttcgctgctctgggtcattctgacaacaggcggtatcattattactgcgctgacatatgtcggctaccgaaaatacagagcggaaaaaaagaaagagaaaaagcgtgagtatcctaagtctaaataaacagaaattgctgtaaaggagctaagtcagtgaaaaaactcatccagcaattggcttcaaaacacctcccgcagccgatcagaggcagaaaaggggcgactgacgaaggaccgcgaaacctcgcgcgtgacttccagaatcctgacatgctcgttccgccctcaacggatgcaggaacggttcaaaacttgaaattctcattttctgatacgcatatgaggcttgaagacggcggatggtccagagaggtgacggtcagggaactgccggtatccaaaaacatcgcggcggtgaacgaaaccgggagctgtgcgggagcttcattggcataaagaagccgaatggggatatgtgattaacggagaagtccgtttaactgcggttgatcaaaatgggcggaattttattgataacgtaagtgaaggggatctgtggtattttccttccggcattcctcattccattcaagggatggaacggggcagtgagtttttgcttgtctttgatgacggctctttttcagaaaacagcaccttttcagtaacggactggtttgcccataccccgcgcagcgtgctggaggcgaacttcggtgttcccggatatgacttggcctacattcacaagaaagagcgttacatgtttcagctggaaccgcctcccccgattgaacagtcagcagtttcttccccggaaggcaccgttttggagccgttcagctacaagctttcccggcaggagcctcttgttaccagcgggggaagagtaaagattgtcgattcaaaaacgtttaaggtgtcaaaaacgattgccgcagctcttgtggaagtcgaacccggaggcatgagagaattgcattggcatccgaatacggacgagtggcagtattatctttcaggagaagcgaaaatgacggtgtttgcggcggagggaagagcgcggacatttaactatcaagcgggtgacgtaggatatgttccttttgcaatgggacattatgttcagaataccggtgacaccgtgcttcgatttctggaaatcttcaaaagcgaccgtttcgaagacgtctctttaaaccaatggctggcactgacgccgcagcgcttcgtcgagcagacgctcaatgtcagtccggcattcgcccgccgattgaaaaagaaaaaatcaccggttgtcaaatggaaacacgaacagtaaaggcggcaaaagccgcctttttattatcgtctgatcggatttttattttcatcaagcgtaaatccttcgccgagcacatcatggacgtcgcttactgcaacaaaggcgtgcgggtcaacggaagtgatgacgcttttcaaaagcacaatttcgtttttcggaacgacgcagtaaagaacgtccctgtcttcttttgtatatgatccctgtccttttaaaacggtgacgccgcgctccatctcttcaatgattttttgctgaatcaaatcgtttttcgaagaaataatcgttgccccttttgcggcataaccgccttcctgtataaaatcaatcaatctcgcagcgacaaaaacggctacaagcgtgtacatcgcttccttataagaaagatacgtaaacaaagaaagcagaatgacacaggcgtcaaaggcaaacatcgtccggcccatcgggattccgaaaaatttgttgatcagcctggcgatgatatcgaccccgcccgtcgtgccgccgtatttaaaaattatgccgagacccgcgccgataaatacaccggcgaacaaggcggccagcgctaaatcatgcgacagcggcatatgaatttcgtagcgctgaaaaacactcagaaaaacggaaagagagacggtgccgatcagggtatagacaaacatcgtccggccgagcatgcgccagccgatgaaaaagataggaatgttcaataccaggttggaaatagaagggctgatgtggaataacgcatataaaagcagcgtaatgccggtaaatccgccttccgccaaattgttctgcatattaaagtgaaccagtccgaatgaaaaaacagcggcgccgattaaaataaagcaaatgtttttgattctgatttctccaagcattgcatcaaaccccttttccttccataagattgcgtaaatattatagtggatacaaaagaaaacagcaaactgccgtttttaacatttgtcaaatgtacttgaattagctaacatggaagagatgacaggaggtattcgcacagtgagtgacaaaacgatgaaagacttacaagctgaggtcgatgaatatatcggccaattcaaagaaggctatttcagcccgcttgccatgatggcccgtctcacggaagaactgggcgaacttgcaagagaagtcaaccattattatggggaaaagccgaagaaaacgacggaaaatgagaaaagcatggaagaggaaatgggcgatgtgctgttcgtcctgatctgcctcgccaactcccttgatatttcattggaggaagctcataaccgcgtcatgcataaatttaatacacgtgataaagaccgctggactagaaaagaagaaggaaagtaggagaaaccatgtcaaatgaaaccattaaagtcgtcattgccggaccgagaggcagaatgggccaggaggccgtaaaacttgccatccgcacgcctcattttgagcttgtcggcgccattgaccatacatacgatcagcaaacattgcgggaagtgatgtcagctgattcagacgctcttatttatacggatatccgcgcatgtttccaacaaacaaaaccggatgtgctgatcgatttgacaacgcctgaaatcggcaaaaaacatacgaaagccgctcttgaacacggcgtccgccccgttgtgggaacgaccggattttctgaagccgatttagaggaacttcaagccttgactgaagaaaaaggaatcggcgccatcatcgctccgaactttgcattgggcgcggtgctgatgatgaagttctcacaaatggccgccaactattttgaagatgtagaaatcattgagcttcatcatgatcaaaagctggatgccccgagcggaacggcgctgaaaacagcggaaatgatctcaagcgtccgtacagaaaagcagcagggccatcctgatgaaaaagaaattctgccgggcgcccgcggtgctgaattaaacggcatccgccttcacagcgtgcgtcttccgggccttatcgctcaccaggaagtcatgttcggcatggacggccagacgctgaaactgcgccatgactcctataaccgggcttcctttatgtcaggagtgaagctgtcagtggagcaagtgatgaaaatcgaccagcttgtatacggactcgaaaatattatcgactgaatcggcaagggggagaacatcaaatgaaaatcgctttgattgctcacgataaaaaaaagcaggatatggttcagtttacgaccgcatataaagatatactgagccatcatgagttatacgcgacaggtacgacaggcctgaaaatccaggaagcgaccggattgtctgttgaacgttttcaatccggcccgctcggcggagatcagcaaatcggcgcattgattgcggcaaatgccctggatctcgtcatttttctgcgcgatccattaactgcgcagcctcacgaaccggatgtctcggcgctgatccggctgtgtgacgtatacgcgatcccgctcgccacaaatatgggaacagcggaaatcctcgtccggacgctggacggcggggcatttgatttccgcaatcttgtgcgcggaggagagccgaatgtctgaacacgttgatattctggcgttcggcgcccatagtgatgatgtcgagatcggtatgggcggcacgatcgcaaaatttacggctcaaggaaaaaccgcggtgatatgcgatttgaccgaggccgaactatcatctaacggaacggtagggataagaaaagaagaagcggcaaaggcggcccgaattctcggcgtaaaagagagaatccagcttacgcttcccgaccgcgggcttttgaaaagtgaggacggcatccgccggattgtcagtgtcatcagagcctgccggccgaaaaccgttttcatgccttatccgaaagaccgccatcctgaccacggaaatgcggcggctttggtcgaagaagcggtgttctcggcgggaattcataaatacagagatcaccaggaactgccggctcataaggctcagcgcgtatactattatatgatcaacgggtttcaccgtccggactttgtaatcgacataacggaaaccatcgatttgaaaaaagaaagcctgcacgcctatgaaagccagtttattcctacggcgcagtcagtgaatacaccgctgaccaacggttatatcgaaatggtggaagcacgggaaagactgtatggcaaagaagccgggacggggtatgccgaaggcttcttttcaaaacagcttcccgttttgaatgatgatgtttttgggggcggacaatgagaccattaaaaatagggattacatgctacccgagtgtcggaggctcgggtattattgcgacggaactcggcaagctgcttgcggaaaaagggcaccaggttcatttcatcacatcaagcatcccgttcagattaaatacatatcatccgaatattcattttcatgaggtggaagtcaaccaatacgcggtatttaaatatccgccttatgaccttacgctggcgagcaaaatcgccgaggttgccgcgagggaacatcttgatatcatccacgcgcattatgcgctgccgcatgcggtatgcgcttatctcgccaaacagatgctcaagcgcgacatcggcatcgtgacgacgcttcacggtacggacatcaccgttttaggatatgatccgtcattaaaagatttaatccgttttgccatcgaagcgtccgacagagtgacggcggtatcaaccgcgcttgccggagaaacatatgacttaatcaagccggataaaaaaattgagaccatctacaactttattgatgaacgtgtttatcttaagaaaaatacagagagtataaaagagaaacatggcattttgccggatgaaaaggtcgtcatccatgtttcgaacttcagaaaagtaaaacgtgttaaagatgtcatccgtgttttccgtaatatcgcagccaaaacaaaggcgaagctcctgcttgtcggcgacgggccggaaaagtgcgtcgcttggcagcttgtcgaaaaatacggactgcaggatcaagtgctgctcctcggaaatcaggacagggtggaagagctgtattccatcagcgaccttaagcttcttctgtctgaaaaggaaagtttcggactcgtcctccttgaggcgatggcctgcggcgtaccgtgcatcggaacaaatatcggcggaatcccggaagtgattaaagatcaagtaagtggttttctggtagaagtcggcgatattcaggcggcatcagaaaaagcgcttgccgttttagaagataaacagctcagcaaacgattgactgatcatgcgctgaaaatggtggagaccgccttttcttcgcaaagaatcgtcagtcagtatgaacggatttatgacgaattggcaggaccggagtgatcttatggaacaggaatttgtcaaagccctccccatccttcatcatctgatgaaggcgggccatcaggcgtactttgtcgggggagccgtcagagacagctatatgaaacgaaaaataggtgatgtggacatcgcaaccagcgcttcgccgaatgaggtggagcgtctctttaagcggactgtcgatgtaggaaaagagcacggcaccgtcatcgtcttgtgggaagatgaaacctatgaagtcaccacttttcgtgccgaatcagaatataaggactaccggcgacctgaagctgtgcggttcattacttctttatcagaagacttaaagcggagagacttaacgattaatgcgatggcgatgtctgccgaaggagagctgcttgattatttcggaggcgcacatgatatcggacaaaagctgatccgaacggtgggtaaccctgaagaccgttttcgggaagacgctctgcggatgatgagagccgtccgctttatgagtcagctcggctttctgttagaaaaagaaacaagagaggccatcatgaaagacagggagcttttggcacatgtatcagtagaacgaaagaccgtcgagtttgaaaagctgctgcagggcgtttcctcacaagaagcgattcaaacgatggtgcaaacaggtctgatacaagagctgcccggtctttccggttatgagcagcaaatgcttgaagcaagcggatttccgttttcttctttagatgaacgcgaagaacgctgggcagcgctgttattgcttctcggtctttgtccgaaaagcgccgaggcgtttttaaaacaatggaaactgccgggaaaagtcataaaaaaagcggtgcaaatcataagcgtttatccggtgcagctggaagcggaagcgatgtaccgggcgggagaggcgctgttttcagccgttaaaatcgggatgctgaaaaagcataagacgattgatgaacaaaagctgaaagaggttcagagcctgtatgagcagctgccgatcaaaagtcttcgagacctcgacatttcaggcgctgatctgatggagctcagaaaccgccgcgcgggtaaatgggtggccgaagaacttcgccggatcgaagaagcggtattggcagggaagctccctaaccgaaaacatgacataaaggagtggctcgcatcatgggatcaacattaagaacccgattaattgatttattttctgaggcgggtgacggctttatctccgggcagaaaataagtgacgcgctcggctgctcgagaaccgccgtttggaaacatatagaggagctccgcaaagagggctatgaggttgaggcggtcagacgaaaagggtacaggctcattaaaaaaccggggaaactcagtgaatccgaaatccgtttcgggctgaaaacagaggttttgggcaaacagcttcattaccgggacgtcctgccatccacccaaaaaaccgctcatgaacttgccaatgacggcgcgccggaaggaacgctcgtagtcgccgataaacaaacggcaggcagaggaagaatggccagagtatggcattcacaggagggaaacgggatttggatgagcctcattctgagacccgacgttcctttgcaaaaaacgccgcagctcaccctgttatctgccgttgcggtcgtacaggccatcgaggcttttacaggcgtacagcccgccattaaatggccgaatgatttaatgattcacggcaaaaaagccgtcgggattttaactgagctgcaggcggaagaagaccgtgtccgttcggttattctcgggatcggcatcaacgtgaaccagcaggaaaccgattttcccggcgagcttcaggacattgcgacgagcctcaggatggaagccggcgaaaaaattgacagagcgggtctgatacaagagattttgctgacttttgaaaaacgctatcaggattatttgaaccacggctttacaccgatcaagctgctatgggaaagctatgcggtcggactggggaacgagctcagagcgagaacgctgcaagggacgttttacgggaaatcgctcggcattgatgatgagggagttcttctcttggaaacgaaagacggtataaagaagatatattctgccgatattgagctcaattaatcttagttggtacaagcctcgtgaatttggtatacttcctatgggcagtatcataatgaactgcacctgatcagcagaacagagattacgaaaagtctgccttgatccaaaaaaggactgggacagagggatgacattcgccgaacgttaaacaagtggggatccttcttattttacagaaggcttttttgcttgcgaaaaattggcggctcatctcctcaccgtttagaggaggagaaacagaatgaaaacaaaactggatttcatgaaaatgaaggaaaacggagagccgatcgtgatgctgaccgcttacgattatccgcaggcaaagcttgcggaacaggcgggagtcgacatgattttagtcggggattcgctcggaatggtcgtgctcggactcgattcaacagtcggcgtaacggtcagtgacatgattcaccatacaaaagcggtaaaacgcggtgcgaaaaatacgtttatcgtaactgacatgccgtttatgtcttaccacctttcaaaagaggatacattgaaaaacgccgcggccataattcaggaaagcggcgcggacgcgttaaagcttgaaggcggagacggcgttttcgaatccatccgcgcgctgactctcggcggaattcccgtcgtcagccatttaggcctcacaccgcagtctgtcggcgtattaggcggatataaagtgcaggggaaagatgagcaaagcgcgaaaaagctcattgaagacagcatcaaatgcgaacaggcgggagcaatgatgctcgtgcttgaatgcgtgcctgctgaactgactgctaaaataaaagaagaagtatccattcccgtcatcggaatcggagccggttcaaaagcggacggccaagtccttgtctatcatgacgtcgtcggccacggcgtggacagaacaccgaagttcgtgaagcaatacgccaaaatcgacggcacgattgagtcggccctcagcgattacgtccgtgatgtgaaagaacgggttttcccggaagaaaagcattcctttcagataaaccaaactgtgctgcaaggcttgtacggaggaaagtaagcgatgaaacaactgacagaaactcaacagctgaaagaattgattgcacaataccgctcagaaggccggacgatcggattcgtcccgacaatgggttttcttcatgaaggacatctgacgctggttgaaaaagcaagcaaagaaaacgatattgtcgtgatgagcatctttgtcaatccgactcaattcggaccgggcgaggattacgaggcatatccgcgagatttaaagcgcgatgcccggcttgcagaacaggcgggggcagatgttttgtttgcgccgtctccaagtgatatgtataaaggcgagcaaaatgttgccgtgcaagtgaaaaggagaactgacgtgttgtgcggcgcctcccgcgtcggccattttgacggagtggccactgtgctgacgaagtttttcaatctcgttaaaccgacccgcgcttacttcggcctgaaagatgcccagcaggcagcggttgtggacggattgattgaggatttctttatggatatcgaattggttgcagtggacacggtcagagaagaagacggacttgccaaaagctctcgcaacgtctatctgactgagcaggaacgcaaagaagcgccgatgatctataaagcattgcagcaaggtgccgaactgatcagagacggtgaaagaaatccggaaaccgttataaaaaccgtcaccgatatcatcgaaaacacaagcggcgtcattgattatgccgaactgtacgcttatccggagctgactccgcttaaaacattaaacggcaaggtcattctggcctgcgccgtccaattttctaaagccagactgattgataatatcattattgatattgatgaatgggagagatcataatatgtaccgcactatgatggccggaaaactgcaccgcgctaccgtgacggaagccaatttaaactatgtcggcagcattacgattgatgaagatcttttagatgccgtcggaatgctcgctaatgaaaaagttcagattgtgaataataataacggagcgagacttgaaacgtatattattcccggtaagcgggggagcggcgtcatctgtttaaacggagcagccgcccgtctcgtccaagaaggagataaagtcattattatttcttatcaaatgatgtctgatcaggaagcaaaaagccatcagccgaaggtggctgttctggatgatcagaataaaatcgagcagatgctgggccaggagccggcacacacgattttgtaatagagcccccttcatgggggttttcttttaagatttaggggcaaaagctgtttttccgctccatttctcaacaaaacgtgttacacttttctcgtatgcaagaattgaggtgtccattttaatgaacaaacaacggttcgttgtcatagatgtcgaaacaacaggaaattcgcctaaaaagggcgataaaatcattcaaatcgcagcggttgtcattgaaaatggacaaataactgagcggttttcaaaatatattaatccgaatcaagtcattccgccgtttattgaacagctgaccggaatttcgtccggaatggttgaaaatgaactgccgtttgaagcggtcgcagaagagatttttcatctgcttgacggcgcgtattttgttgcccacaatattcatttcgacctcggatttgtccggcatgaactgagcgaagcgggctatgagctgccggattgtgaagtgcttgatacggttgagctttcgcgtattgttttcccggggtttgaaggatataagctcggtgagttgtgcgcggagctgaatattgttcatgaccgccctcaccgcgcagacagcgatgcggaggttacgggactggtctttttagacattttacataaactgaaacatttgcctttaccgacattaaagcagcttagaaggctttcacagcattttatcagcgatttgacgctgcttttggattcttttatacatgaaagcaggccggcggaagaaaagagctgcattccatacgcctctttttcaattaaagagcccgatcacattccggtttcccgtccggtgaatgcggccattgaccttgaaaagtggaacgaagaaaaagaacagattttatccggcatcatcccccgctatgaaaagcggaaagggcagctttcgatgatggatgaagtgcttggcgccttccgcaatcgggagcatgcgctgattgaagcggcacccggcatcggaaaaacgatcggttatctcgttccggctgttttatttgccaaagcggagcagactcccgtgattatcagcacgtactctactcttttgcagcagcagatcatgtctaaagatctcccgcttttggagcgtatgtttccttggccggtcaaagctgctattttaaaagggaaatcacattatctgtgcctgcctaagtttgaacatattctgcatgaggaagatgacaactatgatgcggttttgacgaaagcgcagcttctcgtctggctgacggagactgaaacgggcgacgccgctgagctgaatcttccatcaggcggcagattgctgtgggagcgcatggcttacgatgagaattctttttttaaaaaagggaaggactcggctgccgggttttatgaacgggctaaagaaaaagcgcaggccgcagatctgattatcacaaaccatgctttgctgttttcagatcaaagcagtgaaacgaaaaaactgcctgcaagcggaacaatcatcattgatgaagcgcatcatttcgaacgcgctgccagcgagcacctcgggaagagagcttcatacatcggactgcacacaaagctcagccgaatcggaaccttaaaggaacacggactgttaaagcggatgagaaaactgttttatacgtatgaactgccggcggaaagtttttttgacgccgatgagtggatgaagcatattcaatcggaaagcgacgcatttttcagttcagtgcattcttttgtcaaacgaagaaaacctaaagacgatctgaaccgtctcgtctatagtctcaatcataaaagccaggataaagggtttcacatgataacggacggagcggagcggctttgcgcgatgctggatcagctgcttgacatgttttcagtacaggagaaactgttacatcaaaagcttgaacagatgaaaagcggagcggcttttttagcggccgaatatgtaaagtgtatcagggggctgaaagaatatcgcgatacgttcagcaggctgctgtttgaaaatgatgagaaagaagccgtttgggttgaaattgatgcgaagggcgcaaaaaatgccgtcagcatctatgcgcagcctttggagcccggtgaaatgctggcagaccagtttttcgcccgcaaaaaaagcgttgtgctcacatcagcgaccttaatggtggagcagtcttttcaatttatgattgaaaggctcggacttgcggatttttatccgcgcaccaaaagcatcccgtctcctttttcttacgatgatcagatgaacgtcatcattccgaaagagatgaaatccgttaaatatgacggagagcgggaagtcattgagcatattgccaagtatgcagaaatcatgtcaaagggaaaacagccgaagatccttgtcctgtttacgtctcatgatatgctgaaaaaagtgtatcaggaactgaaactcagtatggagatctcaggcattcagcttctcgcccaaggtatttcgggcgggagtcccggtaaattaatgaaaacctttaaaacggcaagccgggcgattttgctcgggacgaatcatttctgggaaggcgttgattttccgggggatgaattgtcaaccgtcatgatcgcaagacttcctttcagggcgcctgacaatccgcttcatgccgcaaaatgcgaatttgccaagaaacaggggaaaaatccgtttcagacgatttccctgcctgaggccgtgttaacgttcagacaggggatcgggcgcctgctccgtacggcgggagacaagggaacaatcgttcttttagatcagcgtgtaaaaacggcgggatacggacggctgtttcttgaagcgctcccgacttcatctcttttggaactgacggatgccgaaatggcggcttatgtcagccaaacggaataaaagccgcataaacgcggctttcgtggtgtgggatgaggaattgtttttatagtaaaagcgggttcatgccgccttgtgattttattatgccgcgggcgcatcccgttatgactaacaaaatttgttcgaccgatggagggtataaaaatggaaagcaaaattgaaattctgtcaacgattaatgtggagcattcagatgatttatataaaatcgtcgatacattaaaccggactttgaaacgggacaatctgatgttcggccttgcgctcgacgaagaaaatcaaaatgaagcggtcttcaccatttatcgcacataggtgaaaaagatgagaaaaaaagcattaatatttacagccgtatttggtattatttttttagcagttcttttattttcggccagcatttttaaatctgcaatggctcaaaaagaagaaggccacgaaacagctgccgcagccgctaaagaaaaaacggagctgacagatgctgagaaagtggagacctttgtcggcaaacagaaatattatgttgttaccggaacggataaacatggaaaagatatgtatgtatgggttccggccgacaaaaaagcaaaaatcctctcaaaaaaagccagtgacggcatttcaagcggcaaggctgccaagatcgttcgggacgaagggcttgtttccaagctgaatggcgttcacccggcgagagaaaacaatgttccgttatgggaagtgacctatatcaacaaaaacgggcagtatagctttagctatgtggactttacaagcggcaagattctcaaaaacatcacaccgtgagacgtattagggggagttcaagttgaaattggcaaaaagagtatccgcattaacaccgtctgcaacacttgcaattactgcaaaagcgaaagagctgaaagcagaaggccatgatgtcatcggcctcggagcaggagaaccggattttaatacgcctcagcacattatagatgccgcggtgcgttccatgaatgaaggccatacgaaatatacgccttcaggcggtctgccggcgctgaaagacagtatcgcaaaaaaattcaaaaacgaccaggggattgaatataagccgtcagaaatcattgtctgcaccggcgcgaaacacgctctgtatacattatttcaggttattctcgatgaaggggacgaagtgattataccgactccttactgggtcagctaccctgagcaggtgaaactggcaggggggcgtcccgtctatgcagaagggctggaatccaatcagtttaaaatttcaccggagcagctgaagcaggctatcactgagaaaacaaaagcgctcattatcaattcaccgagcaacccgacaggtgttatgtatacgaaagaagagcttgcggaactcggaaaagtgtgtctggagcatggcattctgatcgtttctgacgagatttatgagaagcttacatacggaggaaaaaaacacgtctcaatcgcacagctttcagatgaattgaaagagcagacgatcatcattaacggcgtgtcgaaatctcacagcatgacgggctggaggatcggctatgcggcgggttcggagacgattattaaagcgatgacgagccttgcgagccacagcacatcaaatccgacgtctatcgctcaatacggcgctattgcggcctataacggtccggctgagccgctggaagagatgagacaggcatttgagcacagactgaacaccatttacgctcagctcagtgaaattcccggattcacctgtgtcaagcctgaaggggcgttttacttgttccctaacgccaaagcggccgcagaaaactgcggattcaaagatgtcgatgaatacgtcaaggcgcttctggaagaagaaaaagtcgccatcgtgccgggctcgggtttcggttcaccggacaacgtccgcttatcttacgcaacgtcactcgatcttttagaagaagcggtcgaaagaatccgccgcttcacggaaaaacacagctgattctgaaaaagcggcttttaaagccgcttttcacttgcattgaccccgttagagtagaacgggtataataaagtgatgaaaaaagagattcaggcagattcctgaatgtctttcttgttctggagggaaagagtttgaaaacaacaatcaaccaagtgtataaacacacaggcgaggaagtaacgattggagcttgggtcgctaataaacgctcaagcggtaaaatcgcatttttacagctgagagacggtaccggcttcattcagggagttgtcgtcaaagctgaagtagaagaagacatcttccaaatcgcgaaatcagtgacacaggaaacgtcgctttatgtaaaaggaattgtgaaagaggacgagcgttcaccgcttggctatgagcttgctgttacatccattgaagtcattcacgaagcgactgattatccgattacgcctaaagagcacggtacggaattcttaatggatcacagacatttatggctccgttcgaaacgccagcacgcaattatgaaaatccgcaacgaaatcatccgtgcgacttatgaatttttcaataaagaaggcttcgtgaaagttgatccgccgattttgacgggaagcgctccggaaggcacgactgagctgttcgcgacgaaatattttgatgaagacgccttcctgtctcaaagcggtcagctgtatatggaagcagctgcaatggcgctcggaaaagtattctctttcggaccgacgttcagagcggaaaaatcgaaaacgaaacgccatctcatcgaattctggatgattgagcctgaaatggcatttgttgaatttgaagaaaaccttgaagttcaggagaattatgttgcatacatcgtacaaagtgtgctggaacattgtaagatcgagctgaacacattaggaagagacacatcgaagcttgaacaaatcaaagcgccattcccgcgcattacgtacgataaagcgattgaattcctgaaagaaaaaggctttgacgatattgagtggggagatgacttcggtgcgccgcatgaaacagcgattgcagaaagctatgacaaaccggtgtttatcactcattatccgacatcattaaaaccgttttatatgcagcctgccaaagatcgtgatgatgtcgtgttatgtgccgacttaatcgctccggaaggctacggggaaatcatcggcggttcagaacgcgttcatgatatggatttattggaagaaagattaaaagaacacggtctggattcagatgcttacaaatggtatgctgaactcagacaatacggttctgttccgcactccggcttcggcctcggacttgagcggacagtggcttggatcagcggagcgcctcacgtgcgtgaaacgattccgttcccgagacttctgaaccgtctgtatccgtaatagttttaaaaaacgaagtctcctgcaagggagactttttctaagtaaaggggaaagctcccggagataaccttttacagtaagaggtgtaaggatgaaaaaacagcaatttatagatatgcaggaactcggcatttcaagcattcccaacctgctgctgacacattaccggcagctcgggctgaatgaaaccgaattgatcctgcttttgaagattaaaatgcatttggaaaagggctcttattttccgacgccgtttgaacttcaatcaggcatgtccatctctgctgaagaatgtacaagctgcctgagaatgtttattcaaaaaggttttctgtttattgaagaatgtgaagaccataacggcataaagtttgaaaaatattctctgcagccgttatgggcgaagctgtatgattacatgcagcattctcaaaatgaaacgcaggaaagaacgtcagaaagagaacaaaaaagcctgtataccatctttgaagaagagttcggaagaccgctgtcgccccttgaatgcgagacgctggccatatggcaggatcaggatcagcatgatgcgattctgattaaacacgccttaaaagaagctgttttatcggggaaactcagttttcgctatattgaccggattttatttgaatggaaaaagaacggcttcaaaacggttgagcaggcgaaggcgcacagccaaaaattccgtcgtgttcaaacgaaacaaaatgatccgcaaaaagagtatacgaggcaggtgcctttttacaattggctggaacaataacatgagaaggggagaaacgtgttaaatttaaagcagattgaatattgtcttgaaaaaatcggcgatatgtttccgcacgcagaatgtgaacttgtccattcaaatcctttcgaattggttgtggcagtcgcattatccgcgcaatgtacggacgctctcgtcaacagagtgacaaaaacgctatttcaaaaatataaacggcccgaagattatcttgccgtatcgctggaagaactccagcaggatattaaatcaatcggcctataccgtaataaagccaaaaatattcaaaagctgagcaaaatgatcatcgaagagtacggcggagaagtgccgaaagaccgggatgagcttgtgaatctgccgggtgtcggacggaaaacggcaaatgtagtcgtgtctgttgctttcggcgtacctgcgatcgcagtagacactcatgtggagcgggtctctaaacggcttggtatctgccgctggaaggactctgttttggaggtagagaaaacattaatgaaaaaagtgccgaaagaggattggtctgttacgcaccacagattaatatttttcgggaggtatcattgtaaagcgcaatctccccgctgtgcggaatgtcctttgcttccgctatgcagagaagggcagaagcgtgacaaaaaagggctggtgaaacggtgacggcgattgacattctggcaggctatgaaacatacctgcgcagccttacggacttggaaagccttgagatcaaaacggcgctgcgccgccatccgctgtatatggatttcagcggtcagccaaccgtgcagccatggagggaaaggggcgaatatgtcccgtttctatttcagatttggaacgaaacgaaagaaacgctgcttcccgtttttcaaacaagaaaatcgagatgtgatcaaaatgacatgctgaagggaattgcctgtctgattgccgcttttcactggacggcaggggagcgggtcacatcacttgattggtctgtgcttgaaacaaagcattttcccgccgaaccgatcaattgggcggagcgaatggcgtttattttaacaaaaccgactcaatatcactcgtttattcagcttgatgaattgatgacggagatgaagaaacaatatcataaatatgaagccatgaacaaatgttaaaaacctccttttctcataaggaggtttttttgtatgaaaaaaatccttcacctgtttgaggtgaaggatttcgtccgctaatgagcggggtttgactggatggttgacgaattggactgcccgttgatatttgaagatgagtctttgtttttgtccgtttgaccgctgtcaggtttatttgagccgtctgaaccggaatcggaatcattatcagagccgttatcttgctgtccgttgttatcagtcccgttgccgggctgattctgattgttgttatctgtttgatccttatcgggttgatcctgatttttatccgggtcatcagttggtgtttgatccgatccgtcagacgtatctgtctgattgtcatctgtgtttgaatcatcagtttgcgtcttgtctttgtctttatcttcatcagacttctgttcatcgtcagtcgctttatctttatccgcatcgtcttcttcatctttcgggactttgaaagatgctgatgccgtatcgctttttccgtcatcgttttccgctgtcacctggaagctgtatgtggagcctggcgtgacatctgggacgacggcttcttttgccgaactgttttgaatgtcactgtagcttccgccgtcaacggattgtttgacattgaatgttgcatcaccgtcataattccagcttaaggttaatgattttttatctttgtcgtatttcacttgcaatcctgtcggtttatcggctttttctttcgtgtacgttttagaaacggcagttggctgcgttcctttcacgaagtactccgtcacttttttatcatccggtgtatttggtccggctaaagcggcaggattcgagcctttctcaactgtttcttttacgacgctgtcaggctgcttgaagcttcctttaccgtcatcaacgtatgagatcagcttttggaaaatccgttttgcgacttgctggtcagcagcagacagtgatttcttacctgctttgttgccagactcaactccggtccaaaccgctgctgtatattgaggggtgtatccgacaaaccatgagtctgggactccgcccggagcaatgttatatttttgaatatcacctttagtaaagtttgtcgtacccgttttaccggcgacttccacgttcggtacttgagctagtctgcctgttcctgactgcacgactgttttgagcatatcggtaatcatgaatgccgtgtaatcgctcatagcacttttcggtttcggtgttaaatcaagcttagtgccgtcattaaattcaatcgatgtgaccgcatgcggttcattgtacgttccgttatttccgaaagcgctgtaggcgcccgccattgtcatagtagatacaccgcggttatcctgaccaaatcctccgatcgaataagattcggttacactctctttgtttaatcctagtcctaagtcatttgcgaagtcgacggcattatctttaccggctgcttgatatgctttcagagccggaatattacgcgagtctgagagggcctctcgcattgatatcatatttctgtatttattgtcatagtcgtgaatcggagtgccgtcagagtacgtataagctgagtcgtcaatctgctcatacgtcgaccattttttattttcaatgaccgggccgtaatcaagaatcggttttatcgttgaaccgggctgggttttaccttgtgttgcataattgaatcccccggtagttctgttccgtcctgctccgatggcgcggatttctccgtttgtcgtatcaaggagcgtgacgccgccctgcatgccttcggtaaatccggctgtgtcgccgttcatcaattgatcaagataatcttgtgctttcgtatcaagagtcgtgtaaattttcaatccgtcagttgaaatatcgacgtctttcttttcttttgtctcaatttctttcataacttcttcgacaaaagcgctgtatttatttgtgtcctttttatcgtattccttttggctgacgacgccttcatctttcatggacactttcttcgctttttggtattcagaatttgaaatgaatccttgtttttccattaagctgagaacgatgtttcggcgtttttcggaagccttcggatttttaaccgggttatatccggtcgggctttgcggcattccggcaagcgtcgccgcctgttcaaccgtaagcttgctcaaatcttttacgccgaagaattcttcagccgctttaccgacgccataggcgcgcggtgagaaataaattctgtttaaatacatttctaagatttcatctttagaataatggcgctccagctgcagtgaaagccacacttcctgtgctttccgtttaatcgttttctgatgggtcaaaagcgagtttttcacaacctgctgggtgattgtgcttcctccctctgaaccgaatccatccgtaaagttggcgaccaaggcgcctccgatccggatcgggtctataccgtggtgcttataaaaacgggcgtcttcagttgcgataaatgcttctttcacaacatcgggtatatccttaatcgggacgtaggttcgtttttcaccacccacttccgcgatttctttgccgtttttatcgtaaatcgttgaagagtaaggcgttttcagctttgcttcgtccaaagagggcgcgccggaaaccaaaacggcaaatgccgccgctccgccgactatgccaaggacaaacagaataaccaaggacagcacaatctttttgaataaaccgcctttacgctgtttcttgccttttttcggtgaagagggcttagtgcttttcgtctgccttgccttacggcgttcttcacggctcgtaaattgatctgacataacatctcaacctttcgtttatcaacctttcgctcagtctactgttcctgcgaaaaataaagctgttcaataatactaatataatcaattctcggtgagtatccaagggaaatcggaaaggaagcatcttctaattcgtctttgcgaattgattttctgccattgttctcctttctctcccaaaagacaaacagcttgtcggcttcgaggaaataaacctttccgaaagcggatataataacaaaacaaatgccgtcttgcctgaccacctgcttcatatgttcaatctgatgatcatgaaaattctgcaggggaaatgccgttttgttttttgtttcttttgcctcaaaatcaatgtagcgtcctttataaatgccgttgtagtcggttgtggaagactgtttaaaataagcttccttaatgactgcggcgcttcttttcggatagtggacgtttacaatctggacgggtgtcggctttttgtgaatgacagcaatttggttagccagataatacttattcgtttcattcagatcgtcttcgagggtcatgccgcgattactgtatgaatgagaccgtttctggctgttttgggatgaaaccgttttgttcggctgaaaagtttttccattcgggtaccgaatcactttttccatcctccttatcaaactaatagtgacggaagtgaatgaacgtgcataaacgacagaccgtaaccgccattcttcgcctgatcgaaaaagagacgaaaataaaaaatgccgataatatttcccggacgaatgcctataaagcatattatgaccgccatcctgagatcaagtggccgcttttggcatcctttgtgtcccgcaatgcgggctggtcgatgactgatttaagaggcgtcctttatcaggagggccttgacagcagtcagaaaaactggtttttcctttcgtatgaaagggcgaattggctgattttttctgatgcctatcctcagcttctggtctaccagtggtcaaaacaaatcggtgaacctcttttccgtcatcttccttatttccgcgtctcggcttttatgcaggaagaatggttccgcttttggcgtgacggagatacggaacggctcatgtatgctcttattataaatgaacaaaacactatccaagcacctattatacaaaatccttcgtttaaaaagaatgtttttggcacgattcctttttatttaagtgattggtttcactttaatacggtgatattcccttcatttgacggacatttatacggaatttccgtcaaacggttttcaaaaaccgaagagagaattacgctcggaaaacagctggcccgccttctgttcagccctgatcttcacgcttctttttaccgttttcttgataccgttcctcataccggttcacgctttgatatggagaaaatgatcggcatcaaaaaaagaacatcaccgatgctgaggacaacctatcccattgttgcccactcattagacggcgaaagggcggattggtttcaaaaaaggttaagaaaaggggctttcttacaggagaaaatgccgaaacagcttgaactgacggactggtacttccagaaaagacgggagctccatgcgctcttcgcagttaaagagtggctgaagaaatgaaaaagcccgaaaccgttcgctggggtttcgggctgctgatgtgttacgtggaagggcggtttgggccgcctaattttttatcaagcgtatcagtcgtttttgcttcggttttttgctgtttacctgcatttttcggtctcgttttcatacggcacctcctcaactgtatcgtttgcattaacgtgacggttcatacaaagtttgcggcacttttttgtcgaaaggcacgccttttaggataatctctgtttgtttgccgaactgcttctagttttgtcatgtgcagaggagagcggtatgaaaacgagaattatattctaaagagacgcaagtgataaaagggaggaacatgaatgtctgtttacacgagcaaggctgatattctccgtctgctttctgatatcgaaatccggatttctgctgctgaaaagacgcttacccaagcagtcagatcctgtcaggcggaagctgaagaaatcaggcaggagaaactttcccgccttgaggaagagacgcgggagcttcatgtttgtattgatgacctgtttttggctgaccggcgtaaaaaggatttgccgagagcctgccggatcagctgattttatgcaaaaactttggtaccatatgtactgaggtgagtccgtttgcagacacagtcgttattggagctgacagaacaaatgatagaggcggttctggaagccgaaaaaaggtatcaggatggaaaagagtcaggccgttcatatgatttttttgagattattaaacccgatgttgaaaaaagagaccggctttgcgcgctttggacagaagcagcgcttgcgtttattcaggaaaaccgtccgaaatacgttcatcacgcacaaattcaggccgttacagaaaatttcggagagctgatgctccaatcatatgttcatcatattcataaaaaaagatacagggatttaactgaatctgttttatatacgcttcgtatattaagggatgaaattgaaaaagaaggcagctgaaaacggctgccttcttttatataaaggggtcgggtatgttattcatacgccgggttttctgctccacttgcttcgagaaccttcatactgtttcgaaattcggttgcggtgagatggccttgaatatagaggaattttgcaaagtccatcagtttatctgcacaatctgtttcatattttttcacttcagcaaaacgctttcttaagtatgatacgttcataatggtgcatcccctctcatgtatgttgagattatggtaacataacgattcgacttttttctgtttttaaaaaattaagactttcgacagcatttgacaaagatcagaatctccgaaagcacataaccaaggcggaattcatacatatatagcagaaacttagtgagagacaagggggaatgtcatatgcaatggagagcgcagccatatcaaaatatgtaccagcagccggcgggatatttctacccgcagcagatacagccattgcagcagccgagtccgcagcagatacagccattacagccgccgtatccgcagcagatacagccattgcagccgccgccatatcaacagcaagggcagtacccgcagcaattttatccgaatcaggaatacggtcatatgcagcagccgtttgctccccctcctcctcagacagccatgcccggggggcagccggggtttgtgaatccttaccctgttcccagaccgaatcagcagcagtcttcccaattctcaggcatactctcccagtttaaaaaaacgaacggacagtttgactttaataaaatgatggatacaacggggcagatggtaagcgccgtaaatcaggtcggatcgctggtgaaaggcctcaccagtatcttcaaataaaaagcatgaatgatatccatcattcatgcttattttttagggaaaaagagggtaagcgtctgttcattccaggatgtttccatatcttcttcactcaccttatacgggaggacaacggttcttgtcatgcttgaagacacatgggatgaatgagcctgtttatgatcgtagcggattgtaacgtgaaggtagcaccctttcgtttccaccagcatatccccgtcacggaacgtctcgggaacgctgatatcaaccgcgaggcccgtcggctcttctctgacgtcaatcgtcacttgcgcttcagtaaaagccgaattgacaaggtgctgaaaaccctgcatcaattctgcaaagggacctgagtgaaaaaattggtccatcgcatggctgatgatgtcctcatttctttgcggatcaagtttatcgttttgtgattgatccatatgaccaccgcctttttacaaacagactatgcgatgttatgccgtatggttaagaattgaaggaaaaaagaaagtatggttaaatagtggagaataaactggtaacggattcacatttaggaaggggagcacaacacattgctgaaaaaattattcggattgggagacagccggaaaaagccggccgaggaagtgattttttctccggctgacggagcggtgatggatttggcttcagtgccggatcccgtattttcacaaaaaatgatgggggacgggattgccgtcgagcctgcaaacggagacattgtttcaccggttgagggagaagtgattcagctgttccatacaaaacatgctgtcggcatccgcaccctttccggagcggaacttttgatacatgtcggtttggataccgtcaatatgaacggtgaaggctttgaagcgcatgtaaaagaaggagacaaagtgaaaacaggcgatctgcttttaacgtgccggctggatttaataaaagaaaaagcaagcagcaccgtcatccctatggtgattatgaatggcgatgccgcagaacctttgcaatttgcaggcgcaaatgaagcgaaaaaaggacaaacagagctttttacgataaaaatgaagtaggcaggggctgattccctgctttttttcttgtgaggattttcatctagccaggcaaacaaatattcggtaaactgtacctcataaagaggtgtgaacgatgaagaaaaaatcactgagcgaactgatacaggaattaaaaagtcatgaaaatattgtgcattggcatgaagaggaaccgcgggaggcgaaaaccatgccgatgccggagcaagtagatccgaacattcgggcggctctcgaaaagagggggattaagcggctctttacacatcaatactccgcttttcagacggttcaaaacggagaaagcattgtggctgtcacaccgacggcctccggaaaaacactgtgctataatcttccggttcttcagtctatcgctgaagatgcctcaagccgcgcgctttatttatttccgacaaaggcgctcgcgcaggatcaaaaaagcgagctgaatgaaatcatagacgagacgggcatggacattaaaagcttcacctatgacggagatacgtctccggccatcaggcagaaagtcagaaaggccgggcatattgtgattacaaatcccgatatgcttcattcagccattcttccccaccatacaaaatgggtgagtctgtttgaaaacctgaaatatatcgtcattgatgaattacatacgtaccggggcgtattcggcagccatgtggcgaacgtcatccgccgtttaatgagaatctgcgctttttacggaagcaagccgtcatttatctgcacatccgccacaatcgccaatccgagggagttggcggagcagctgacgggaaaatctgtgcgcctgattgacgacaacggcgccccggccggaagaaagcactttgctttttacaaccctccgattgtaaataaaccgctgcatattcgaaaaagtgccaccgtggaagtgaacgagcttgccaaaacttttttgaaaaataagatccagacgattgtttttgccagaagccgtgtccgggttgaaattattttaagccacattcaggagatcgtaaaaaaagaaatcggctcaaagtctgtcagaggttatcgcggcggatatcttccgaaagaaagaagagaaatagagcgggggttaagagacggcagcattctcggcgttgtcagcacaaacgcgctggagctcggcgttgatatcggccagcttcaggtctgcgtgatgacggggtacccgggcagtgtcgcgagcgcatggcagcaggcgggccgggccggacggcggcagggagaggcgcttatcgtgatggtggcgaactctgatccgattgaccaatatattgtgcgccatcctgattatttctttaaacgctcgcctgaatctgcaaggattaatcccgataatctcattatactggtcgatcacctgaaatgcgccgcgtatgagctgcctttcagagcagatgaaacattcggagaaaatgatgcaagagacattcttgagtatttagaggaagaaggggtgcttcacgaaaaccgcgaacgctatcactgggcgagcgaatcttttcccgcctccaacatcagtctccgttcggcgtcacaggaaaacgtggtcatcgttgaccggtcagagacggctgatgtaaaaatcatcggagaaatggaccgcttcagcgcgatgacgcttcttcatgatgaagcgatttatcttcatgaaggggtacagtaccaggttgaaaagcttgattgggatcataaaaaagcatacgtgcgaaaggtcgatgtcgaatattatacagatgccaacttagcggtgcagctgaaagtgctggacattgacagaacggacagcagaaagaaaacggccttacatttcggcgatgtaaccgtgaacgcacttccgacaatatttaaaaaaattaaaatgacgacatttgaaaatataggatcagggccgattcaccttccagaagaagaactgcataccagtgctgcctggcttgaattgaaagagacggattcggagatcggcgaaaaaacgcttgaacagctgcttttaggcattgcccacgtcctgcagcatatcgtgcctgtatacgtcatgtgcgaccgaaatgacgtgcatgtcgtgccgcaaatcaaagccgcacataccggacttccgacaatctttctgtatgatcattatccgggcggaatcggacttgctgatgaagtatataagcgatttgatgaaatcactgaaggggctgagcgcctgatcagacaatgtccatgtcaagacgggtgtccttcctgcatcggttccgaaatagaaggaatagatgcaaagaaagcgatactccggctcttgaattacgtgtaaaagaaaagggggacgaaagatgtccttgaaaaataaattaaagcggatgaaaaatcacctgaatgtgccggaagctgaaaaaaagccggcagcttcacaactttcggtcccggatattcaagtcccatttagagaagaatgggaggcattcggagtgaagcctttcttttttgaggatgaatactgtcttatccgcgaaaccgtctatccgctttcgcaccgtcacggacggtacagcttcagtgaacttgatgacgtcatggcattatggaataaaggcggtttgacacatactttatcagcagaaggatacgaaaaaagccagctgttcttctttgatactgaaacgaccggcctcggcggcggggccggcaatatgatctttttactcggtcatgcaagagtgtatgaagaccgtgtcgcggttaaacagcatctgcttcctaaaccgggaaacgagacggctctttacaaaagctttttaagtgaggttgacattacgtctcttgttacgtataacggaaaagcctttgactggccgcaggtaaaaactaggcatacattgctgcgggacaggcttccgaaacttcctgacttcggacactttgatcttctgcacggagcgagacggctttggaaacataaattagagcgtgtatcgctttcggcggttgaaaatgaagagcttgcttttaaaagggacgaagacacccctggttatttggcgccgatgctgtattttcaatttttaaaggcggaggacccggctcttttaaagggagtgctctcgcataatgaacaagatgtgctttccctcatcgctctttacatccatatgtcaaaaaagatttttgcatcttctgatcagacgtcagaacgtcaggaagcatacgccatggcgaaatggtttatcgctcataaagaaaccgatcgggctgtttcacagctggaagcgctgcaaggcaaagcctttgaagattcagatcgggccctttttgacttagcaatgctttataaaaaacaaaaccgcaggcaagacgccgtgcccctttgggagaaactgacgggctctgatcttcacatatgcagacaccaatcagcggtagagctggcgatctattttgagcatcacgcaaaagattacaaaaaagcgctgcaggccgcgcagcaggcggcagaagacggggaaatatcggaaaaagaagccgagaagctccatgtgagaattgcccggctcaagaggaaatattcctcttgaaatattgcccgggaaagcgcaaaagccgagctgtttcgccaaaaatatttttttctgaatccgcatcgattttgttgtagaatggtgccgcatcttgtaaaatagcgttagttatttataggggagagttggtatgtataaaggtgttttttacttgttctttgtcgtggtttttttgattgcgtttgtgttttcgaattttaaagacagcttgctgacgcacttttaaattgggtgattgaattagaacatgcaccctcttttcttcataacctaacagtgtaataaaagttaatggagaggggatttagcatgtttcatcatcattgttgcagaccaaacgtgatgccgccgattgtccatccgactcattgctgtgaacaccattgtttttctaacacagttgtgccgcatattcatccgcaacatacaactaacgtaaatcaccacaactttgagcacgttcattactatccgcacactttttcaaatgttgacccgacaactcaccagcattttcagtgcggaagcccttgctgcgatcattagtattgaacgcttaagcaagatcggttaggatatcagcaaatcaaaatggggcccgatggggagccccattttttaagcaggtgatcaattgaaagtattagccgtaacaggatacaagccgtttgaactcgggatttttaaacaggatgaccgggcgcttgtttatataaaaaaggcgatagaaaccagactcagaagctttattgacgaaggcttggaatggattctcatatccggacagctggggactgagctttgggcggcagaaacggcgtacgatctcagagaagagtatccggaattaaaggttgccgttatcacgcctttctacggccaggaggaaaagtggaaggagccgaataaagaaatgtatgaagcggtgcttgctcaggcagattatgaggagagcctgacgcatcggccgtacgaaagtccgctccaattccggcagaaaaacgcgttctttattgaaaagtcagatgcgcttttgcttttatatgatcctgaaatggaaggatcgccgaaatatatgctgcagcaggcagaaaaacgccgtgaaacagacggatatccgatttattcgattacgatggatgatctccgtgccgccgttgaagaagaagatttctttacataacacgtcagagaatatttgacaacgggacgtgtttctgaataaaatataacatgatgattcacgatatgaggtgaaaaagatgcttgctgataaagtaaagctttctgcgaaagacattttggaaaaagaatttaaaacaggcgttagaggttacagacaagaagacgttgacaaatttttagatatgattattaaggattatgaaacctttcatcaagaaattgaagaactgcagcaagaaaatctgcagctgaaaaaacagcttgaagaagcaagtaaaaaacagccggtgcagtccaatacgaccaactttgacattctcaaaaggctgtccaaccttgagaaacatgtattcggcagcaaactttatgacgaataaggcagatgcacttgtcaaatgagacaagttgctttataatgaacaagtgttcttaacgttcgggtaatcgctgcagatcattgaatctgtagaggaaagtccatgctcgcacggtgctgagatgcccgtagtgttcgtgcctagcgaagaaataagctagggcagccttgataggctgacggcaggaaaaaagcctacgtctccggatatggctgagtatccttgaaagtgccacagtgacgaagtctcatcagaaatggtgagagtggaacgcggtaaacccctcgagcgagaaacccaaattttggtaggggaaccttcttgaaggaactgaacagatagaaggacagaatactttctgtagatagatgattgccgcctgagtacgaggtgatgagccgattgcagtacgacggaacaaaacatggcttacagaacgttaaacattattgatatgacaaattagagctctccttaaaaggggagcttttatcttgaatgaaatgaaagcttaaaagagacagggtgatacgatgaagaagtacacactaatagcgacggcgccgatgggaatcgaagcgatcgtcgccaaagaagtgcgtgatttaggttatgaatgcaaagtagacaacggaaaagtcatctttgaaggagatgcgcttgcgatctgccgcgctaacttatggctgcggacggctgaccgcatcaaggtacaggtcgccgagtttcaggcgaaaacgtttgatgagctgtttgaaaaaacaaaagcgattgactggcgcgcgtacattccggaaaacgcaaagttccccgttatcggaaaatccgtgaaatcagtgcttgccagtgtgcctgactgccagcggatcgtcaaaaaggcgatagcggaaaagctgaaactgcaatcaggaaaacaaaatgaatggattgaagaaacgggacccgagtataaggtggagatttcccttttaaaagataaagccgtacttacactggattcatcaggaacaggccttcacaaacggggatacagggttgatcagggaggagctccgattaaagagacgctcgctgccgcgttaattcagttaaccaactggacgcctgaccgtccgttcgtcgatccgttctgcggttccggcacgatcgccattgaagccgctttaatcggacaaaacattgctcccggttttaaccgtgattttgtttcagaagactgggaatggatcggaaaagaactgtgggacaaggcgcgtcttgaagtggaagaaaaggcgaactatgatcagccgctgcagatttttgccagtgatgtggatcaccggatggtaaacatcgccaaagaaaacgcagaagaagcgggacttggggacctgattgaatgcaaacaaatgcgggtgcaggattttacgacaaaactcgaattcggcgtaatcgtcggaaaccctccgtacggcgaacggctcggcgaaaaaagggaagtcgagcagatgtataaagaaatgggccgggcgtttgaatctcttgatacatggtctgtctacatgttaacgtcaaatgaacaatttgaagaggcctacggaagaaaagcaaccaaaaaacggaagctttttaacggttttatcaaaacggattattatcagtactgggctaaagtgcggccgcagcggaaaaagccgcaacaaagagaagacgcctgaaacagcgtcttctccggcatctttacgtttattctgccattaccagcggtgcgcttttgcgttgctccgtaaaataatgttggtctgggacatttcggtgtggccgttcacttgtgatttagagcgtttcggccgcgtccaattgtgatgaaacaattcagaatgctgatctaatcgatctttataactcatgtaaccatcactcccgggtagaataaatttgtgaagatggatattcgatcgaatatctgttgtagtttgtgcaggtcaggtgaggatcattcagaatggcatgtatagaaagtgaaacatcggcatagaatgatgattatttctatttgagaggtgatcttattttatgctgaacagcgagcacttcagtaaaatacaaaaggcgttagacgcaactgctttccggctggaggaagccggagcggagttcggtccttccgccatgacacacgcacaggaagaacttgaaaatgcggtaaaacatacacattcaacagaccatccgttcctatgtacacatatcattaaccggaaatgatcatgacaaaaacttggcgaggccaagtttttttgttgtattgaaaagggttaaatgatattatagatggtctgaatgccgaatagttaggggttggagttgggtgacaacatcacgtttgccttttgctttaacaaaagaaaagaatttttacgaagaattgaacaattggattggtgacgtgttttacgatatccttcccgagaaaggctttgaccttcgggatgagcaggtatttatggcgtttcagcttgaacgggcatttaaagagaaaaaggtcatgttcgctgaggcaggagtcggtacggggaaaacgctggtgtatctgctgtttgccatcagctatgccagatatacgggtaaaccggccattatcgcatgcgccgatgaaacgttaattgaacagcttgtcaaaaaagaaggcgacatttccaagctgacagaacatttggatctgcagattgatacacggctgtccaaatcccatgagcagtatctgtgtctgaaaaagcttgagaaaacaatgcagcgttctgatgatgaaaagtggctggatctttatgagtcgctgccttcattcgtacacgaatcacaagcgatgcagcgcttttatccgtacggcgaccgcaaacagtacgctgatttgacgaatgaagagtgggcaggcgtcagctatgattccttccaagattgtttaacttgtgatatgagacatagatgcggtttaacactttcaagagatcattacagaaaatcaacggatctgattgtttgctcccatgatttctacatggagcatgtatggacggaagaatcacgtaaaagggaaggacagctgccgcttctgccggatcacagcgccgtcgtgtttgatgaaggacatctgctggaattcgccgcgcaaaaagcgttaacctatcgcgtgaagcagtcgacgcttgagctgtttttagagcgtctgcttcaaaatgacatcagagaggaattcgccgaactgattgaagatgcccttgccgcaaacgatgagtttttctatgtgctgtcagaggaatcgaaggaaatcgccggctcttaccgattggacatccaaaacgaccagcgtgttaagcgtgcggctgacgaactgtgccgtctgctcgataaaatcggtgaggcgctcgtatttgaatcggaaatgtatacgattgataagtacgagctgtcagtcgtagaagaatacgtcgaacaaatggcatattcgctgtcgctgtatcaaaaggatgccatcagctggcttgaaacgcgggatacagactcaacgtttgtcgttatgccgagaactgtagccgaagttttgggagaaaaggtcttttctaaaaagattccttatattttctcatcggccactctttctgagggcggttcatttgattatatcgctgacagccttggaatccgtgatcctttatcatttaccgttgaatctccgtacgattacgaggagcaaatgtctgttgcgcttcacggtgatatgacgtctgagcagaaaacagccgaaacgattgaaaccattaagaagaatgaaggacgcaccctcgttcttttcccttcctttgaagacatgaaggaatttaaagaacaggctgccgcgtgggagctgccgtatccgatatactacgaaggtgacgaagagatcagcagtctggtcgaaaaattccagcgggatgaagaatccgtgctttgttccgtccacttatgggaaggtcttgacattcccggtgactcgctccggaatgtgaccatttgggcattgccgtatccgcctcatgatcccgtgtttaccgcaaagcggaacggatcgaaaaaagatccgtttgaggaagttgatctgccgtacatgctcttgagagtccggcagggaatcggccgcctcatccgttctaatcaggacagcggaactatatccatttatgcgggcggagaaagtgaacgggtattggacgaagtcaaaacgatcttgcctgttacaccgaaaatcgtataaaaacaaaagctgcaggattcttatcctgcggcttttttaaatccgggaagttgactttatcacggcattccattagcctgtaattgatagtgaaaagggaggggaatggatatggatttacatacatatgaaaaagagttttttaatctgttaaaaagagtatcccactatgtcgaagccattgcacttatgcactgggacttaagaacgggagccccgaaaaaaggctctgatgaccgggcggaaagcatcggacagctgtcggctgacgtttttcaaatccagacatccgaccggatgaaagagctgatcgacatccttctcgcgcatgcagaagagctctctgaagatacagtgaaagcggcggaacttgcgaaaaaagattatgatcataataaaaaaattcctgaagatgagtataaagaatatgtcattttaacatcgaaagctgaaacggcttgggaggatgcaaaggctgactctgatttttctatgtttgctccgtaccttgagaagctgattgattttaataagcggtttatttcgtattggggctatgaagatcatccatacaatgcattgctcgatattttcgaaccgggtgttacggtaaaggtgctggatcagctgttttctgaattgaaggaagcgatcattccgcttatcaaaaaagtgacggcatccggcaataaaccggacacagcctttatcacaaaaacgtttccgaaagaacaacaaagagacctctccttgtatttcttaaaagagttcgggtatgattttgacggcggccgcctggacgagacggtgcatccgtttgcgacgacaatcaaccggggcgatgtacgggtgacgaccagatatgacgaaaacgatttccgcacggcgattttcggaacgattcatgaatgcgggcatgcgatctacgagcagaatattgacgaagcgctgagcggaacgaacttatctgacggtgcatccatgggaattcatgaatcccaatcgttattttatgaaaactttatcgccagaaatcaacatttctggaccgcctattatgaaaaaatggttgaggcttcgcctgatcaatttcaagatgtgaaaagagaagattttgtacgcgctgtcaacgaggcgaaaccgacctttatccgaattgaagccgatgagctgacgtatccgcttcacattattatccgttatgaaattgaaaaagcgattttcagcaatgaagtgacagtggaagaactgcctgcattgtggaatcaaaaatatcatgattatttaggcattacgccgccatctgacgcaaaaggcattttgcaggacgtacattgggcgggcggcgatttcggctatttcccttcctatgcgctcggatatatgtatgcggcacagctgaagcataccatgcttgacgatctgcctgaatttgatcaattaatagaacggggcgattttgagccgattaaacaatggctgacagaaaaggttcatcagcacggaagacgcaaaatgccgcttgacatcataaaagatgcaacgggagaagagctgaacgttcaatatctcattgagtatctcgtcggcaaatattcaaatttatatttataaacgaaacgcccggcatacaccgggtgtttttctaaaaattctaaaaacacgaataatcgaaaccgattctttgtaaaagttcggaaatattcaaatttcactatgcaaaagaagtgtatcttgttataatttgattaatatcatacgaacactcatataatcgcgtggatatggcacgcaagtttctaccggtcaccgtaaatgtccgactatgagtgagcaatgggacggcttttattcggccgttacgtgtagatcattcggcattgcttgctctttttattgagagcgagcaatgctttttttatttttttataagcgggggtaatcattgtggaagcattaaaacgaaaaatagcagaagacggaatcgttctttctgatcaagtgctgaaagtggattcttttttaaaccatcaaattgatccggttcttatgcagcagatcggccgggaatttgcgtgccgttttgaaaaagacgagataaccaaaatcgtcacaattgaatcttcgggcattgcccctgcggtgatggccggccttgaactcggcgttcccgtcatctttgcgagaaaaaggaagtctctcacattaacggatgatctgctgacggcgtccgtctattcatttacgaaaaaaacagaaagtcagattgccgtctccggaaatcatctgtcgaaagatgaccgcgtgttaatcattgacgactttttagcgaacggacaggcggcagaaggacttttatccatcgtaaaacaagcaggcgcagcggtttgcgggatcggaatcgtcattgaaaagtcatttcagccgggaagagatgagctggtgaaaaaaggatgccgggttgaatcgctggcgagaattcaatcgcttgaagacggaaaagtgacatttgtacaggaggtccgttcatgaaaaacggctatgccaaaacactttccctcggtatccagcacgtgcttgccatgtatgccggcgccgtcgtcgttcctttaattgtaggagcggcattgggactgaacgcagaacagctgacatatctcgtatcaattgacatttttatgtgcggggcggctacgctgcttcaagtatggaggaataaatatttcggcatcggcttgcccgttgtgctcggctgtacgttcaccgcggtagcgccgattatttcgatcggtaaggaatacgggatttcagccatttacggaagcattttggcatcgggtctgcttgtcattctgctgtcgtttttctttggtaagctcgtatcctttttcccgcctgtcgtaaccggatctgtcgtgacgattatcgggatgaccttgatgccggtcgcgatgaatcatattgccggcggggaaggcagcgaggatttcggtgatccggctaaccttgccctcggatttacggtgctcgtcatcatcgtgctgctttatcggtttacaaaaggatttttgaaatccatttcgattttaatcggcattgtcatcgggacggccatcgcgtattttatgggaaaagtgcaatttgacaatgtggcgaatgctgatgccattcaaatgattaaaccgttttacttcgggacgccgacatttcatgcggcaccgattattacgatgtccatcgttgccattgtcagccttgttgagtcaaccggcgtctatttcgctctcggtgacctgacaaaccggcgcctgtctgaacgtgatttagcaaaaggctaccgtgcggagggcctggcggtattcatcagcggcattttcaatgcttttccgtatacggcctattcccaaaacgtcggcctcgtgcagctgacaggaattaagaaaaacgcggtcatcggtgtcacgggcgcacttttaatgctcttcggcctttttccgaaaatcgcagccttcacgaccatcatcccgtcttcggtactgggaggcgcgatggtggccatgttcggcatggtcatttcctacggcattaaaatgctcagtcaaattgactttaaaaagcaggaaaaccttctgatcgtcgcatgttcggtcggattgggactcggtgtaaccgtcgttcccgatatgtttaagcacctgccgtcttacttaaatctgctgaccacaaacggaatcgtcgccggaagctttaccgccgtccttttgaatattatttataatatgattcctaaaacgaaaaaaacccttgatgtgacaagggttcaagagggttagttatctgttttctttaaaataacatcttattttatccagatcgaggatgcttccgaaagtttgctgaactttttgtgaggcatcctctttttttattagtttcattgtttgaaaagaaactaaattgagtgatgcggcatccgccttatttcgcggaaaaaccgtcccggactatatgtacgtgaacgagtatcttgtgcacgaattcttacaaaagagagtaaaagaagggaaagccccttcttttaattaatccatccttcaaaagttgcgcgatagaacccttcgattatctctactttcttaaggtaatatgtaacaccattcttaacagttgtatttggaatatcccatctatgaaggtaatccattgtaaaagaatctttggtcgcttgtgtcgaaatttttgtttgagttgagtcgatatttgtattactagggctagatgcaaaagcaggggcagcggaaacgagtaaagcgagagacaaggcaaaaccagttaaaactttttttaatttcatttttaacactcctttgtttttttggtacaattgtattattacatgcaatacaaaaataaccaagggtttttttgttaatgttttgtgagcgtgaatttagttaggagcgatcctttcattcactgttgcggcttatgtcaggatattgataagtatatagagaaaaagagttgaatattgctggcctctggtgaactttagatatttcaatgcttttccaacggggaagatgtgatagtaacttaatcaattgtacaaaagtaaaaactttatttaaaatgttataaatacgaattttcaatataggaggttatctgatggcagaaaagaaaaaagctttaatcattgtggatgtacaaaaagcctttgatgataaaaagtggggagaacgaaataacgtaaaggcggaagaaaatatcagcaaaatactgaaattatggagagaaaaaggatggacagtcatatacatacaacatacttctgataaacctggttctttattttatccgaaaaatgagggggttgctataaaggaaatcgttaaacctatggataaagaagtcattataaccaaaaaagtaaacagcagctttattgggactaatctagaagagcttttaaaagcaaatgatataacaactgtcgtaatcactggcttgactacgccgcactgtgtttcaacaaccacaaggatgagcggtaatttaggatttgatacatacctgatttcagatgcaacagcagccttcggaatgagagaccaaaatgatacatattatgatgcagagactattcacaatatatctctggcaacattgcatgatgaatttgccacaatattaacgactgatcaattaatcaatgattttataaaaacaaactgactaacattatggctaagggcggcggtggatataggcggctgaaaagcatattcaggcgcatacaaggacctcgtcggaaaatacggggattaccgactcttttcatcgtcgcaatatcgattgaaaaaggcatctgcttcagatgctttttttgtttcttgtaaaccggtttcggtaaaaaatgatcggcggttaacggtctgattcggcatcggttttgaataacaaaaggctttactaatcagcgaattattcaagattttttggcttgtgctgaggctctttgttaagacattttggatcgatcacatttttaagatctttgatggttaaaggcttacagtcatcttttaattcgtaacctaattgtccattagcttctaaagtggcatatatatcggatcaattattaaggtcagtgaaactaaaaaaaggggacagagcccccttcatattcgtaccagcgctcaaaattcccataccagattccgttccatgataaaacaattattgacaccgtcaaaatagatatttggaacttcttttctggaaaacaaacatggaacaaaatgatctgctgcacaagttcttaacccttagtttctttaatacagaacatgtcaatagtttttaattttgacacttctttaatatagaattgagaaaaataatgtctggttgaaaaaagtaacatgttagcaatcatttattctcttatcggcacggtaacatacggattatttttagttgttacttagaacaaacattccgcgtcatgaaaaatcagcttttgtagacggctgtccaagtgccatcagcaccatggaaggtgatgttgtctaaataataggtgattccattccggtaaattgaagtaggataatcagggccggaaccattaagtatgaacgtcgccaaagcagatacttccttcgttttactttctgcagaaggtgtatcagcaggacctgcggcaaaagcaggggcggcagaacagagtaaagcgagtgatagggctgatccggctaaagcttttttcattttcattgtaaacactccttttcttttttaatacaattgtattattacatattatgttaaataagtacatgcttatctttgttaattttttgtgaacaaacagataatctatttaaacgcagagatgaaataagtatgatgatgaagcaattatcatctataaaaataaaatcaggaagtggctgattttctcaaaaatcatctactcttgcgaaatgaggagttgcatgacatttacagaacgggcggtagctattatcaaacagattcctgaaggaaaagtgatgacgtatggtcaaattgccgatcttgcgggaagtccgcggggagcgaggcaggttgtgaggattcttcactccatgagtaaaaagcatcgtcttccttggcacagggtcatcaatgcaaagggcgaaatcggattgagagacgaagagatgttttctgtacagaagctgtctcttgaagctgagggggtagcggtcacgtcagacggacggatcgatctcaatttatacgtccatgatccgaatatgtaaaaaaacctgccgtatatcggcaggtttttcagttatatgctgcgagccggccagaaaggttttgccggatataaggccattcctcccgaaggatggagtagtaggcagtatctctgaggccgccgtcgacagccggaatatgcgcgcggcggattccttcaaattgggcaccgatccgcaaaatcgcagtccgtgagcgctgattgcgaacatcggttttcagtgtcaccctgacagcttgccacacgtcaaacgcatgggtcagcatcagaagtttacattccgtattgacaccggtccgctgcacggcagaggcataccatgtgctgccgatctcacacacttccggagctgcatctgtcggccgcgtaaacacttccacatccataaacctcgtgcttccgacgattcggtctgtttcaagactccgtactgcaaaaggcaatgcaagtcttttttcataatcggaaagcgcgcgctcaatataacgctttgtttcttcgattccgtcaggaacatgggtgtaagcgtaagtcgtcctatttcctgaagcagcttcacaaagtgcctgagtgtgatcaatcgtcatcggctctaactgaacgagtgaccctttaagaatgacgggtttcagcatgcttatcacaacctttttttatgaatgggtcaagtatagtcgaacggtttatcactcaaaagggccaattttaaattaaaatggcatgtcagtgaaatcctcgattcaaacttatgcatacattcaggaaaaaagcggaaacctttatgtgaagaggtgatgggcatggcatatgtgttatcggtcggaaccagcattccggaatatcatgtctcgcaagaaacggcggcagattttgcgagagggatgtttgccgattcatttaaggatattgaccggctgttaaaagcctttcaaaacggcgaaattgaatcaaggcagtttgtccggccgattgaatggtataaaacggcacggggtttttcagagaaaaaccggctgtatacggaagaaaccgtcaagcatagtgcggatgcggcacttgattgtttaacaaacccggattgtttaacaaatccctttccatatgaaaaagtggatgcgatcttttttatttccagcaccgggctttcgacacccagcattgaagcgaaagtgatgaatcagcttccgttttctgcgaaaacaaaacggataccgatctggggtttaggatgcgcgggcggagcggccggcctgtccagggcgtacgaatactgccgcgcgtatcctgaagcatacgtgcttgttatcgcggctgaactctgcagtttaacgtttcagccgaacgacaagtcaaaaagcaacttaatcggaacttccctgtttgcggacggaattgccgcagtactaatcggaggagaaaaggcgaaccgaaacgaagtcaaacagccgcttcttccgcggatattcgccactcaatcggtgatgatgccggatgcggaagatgtgatgggctgggaattcaccgacagcggttttcaagtcattttttcaagagatattcccaccctggtttcacagtggctgaaggacaatgttgatgaatttttatttgaatatggcgtcagtcctcacgacattaaaacctttcttgcccatcccggcgggaaaaaggtcattgacgcctatttaacgagtctttcaatggacaccggtcagcttgcggcatctcggaaggtgctgcaaaaacacgggaacatgtcttccgcaactatttttcatgtgataagagaacagttgcttcacgggcggcagaaagaaaacgaaaaagggctgatcggcgctctcgggccgggattttcgtctgagcttttgctgttcagctgggaaaagggggcttcttaatgttttggctgtttatcatgctgcttgcggcccagcggattgcggagatgattgtggcccggcgcaatgagcaaaaggtgaaaaagcaaggcgcagtcgaatacggagaaggacattatccctttctcgtcctgatgcacgtgctcttttttgtctctcttacagctgaggtggtggcgtttcaaaaaacgccttctccaaggtgggccgccattatatgtattattttatttgtacaggggatcaggtattgggcgctattatcattagggcggtattggaatacgaaaatccttgtcgtgccggatgcggagcttgtcagaaaggggccgtacaggtggatgaagcacccgaactacgcggtcgtcatcttagaatttatttttctgccgctgttatacggagcgtattggacactgtttctcttttcgattctcaatgcctgcatgctcactgtgaggattcgcgccgaagagaaagcgttagaagaaaacaccgcaaaatagagattgaaaatcattctcactcatgataagatgtaaatatgaaaatgattctcattcaaggtggtgccgaaaatgacaatgttatttttatttgcagccgtttgtacatacagtgttttaattggtttcgtattgaaaaaagtttcgaataaatcaatgtcttcttaaacatctgcggtttttcctgccgcgggtgttttttctttatcagctgccgatatcggcggcttttttgcgtttcctgaagaaaagtgagccattcttgtgtaaaatgggggagaggtttttttcagagctttctaaaaatgaaaacgtcatttgatgcgacagacacaaaggggtaaagacacatgacagaagaagaacgccataacagggagattttcagcagaacgggtgccttatacgcacaatttttggatcatcaggataaaaaacgggccgatcagctcgcggccattatgaaaaaagcggctgatgaagaggtttatatcgcgtttaccgggcattattcggccggaaagtcctctttattaaacacattgctcggtgaagacatactgccgacaagcccgattcctacaagcgccaacctcgttgtcatccggcacggtgaagataaagtcgtgcttcatacgacggacggggcttatgcagaaattaaaggaagttacgataaagaacaagtgcagcaattctgtaaagacggtgagcaaattgaaacggtggaagtctatgccggctttaaggagtcagagcctcatgcggcctacatcgacacaccgggaattgattcgacggacgaagcgcattttttatcggcggcttcggttctccatcaggctgacgctttattttacgtcgttcattataatcacgttcattcagaagaaaatatgctgtttctcagctccatcaaagaccgtattccaaatttatttctgatcgtcaaccaaattgacagacatgatgaaactgaaacgaagtttgaagagtaccgcaggcaggtggaagatatgcttgaaggcgcgggaataccgaaagaatcgcttttctttacgtctgtcactgagcctgaccatcctttaaacggcatggaacagctgaaaaaacatctgcagaagctgaaacagcaggcaaaaacaaatttatggtctttaacggagagaaaagttgcacacttagtcaaagagcatacagagatgctcgtaaaagatgataaaaacggcagcggagagcagtttgacaaacaagaagcacttgtccgttctgttgaaggtgagcttaaaaaagccgttcaacaggctgaaacagcagagaaagacatcagaaaagacgtgcagaacatattgcaaaacgctaatctgacaccctttgagatgagggagcttgcatctgcttatattgaatcacagcagccctcatttaaaaccggattattcttttcaaaagcgaaaacggctcaggagaaagaaagaaggcatgctgaattttttgccgatattaaaaaaagaacggaaggggaagcggattggcatattatcgacacatttacgaaagcggccaagcggtatgaagcggattcggacgaactgatcaggaaaatccaggcgtaccgcacaccgctttctgatgatatcaccgctcaggcccttaagcagggagcggccttttcatctgaatacgtattaacttatacgaaagacctcgctgaaatgatcagaagggaagccaaaagacagacagcggaactcattgaggagctgaccgcttatgttcagacaaaaaacggaccgctcattgagaacttgaaaaaccggctcgaaaaagaaaagaaaataagggatgagctcgcgcaatcggtaaaagaagaacgcaatgccttggaaaaagcagcccgagtccgcgctttgtgggaagaagaattgacctgtgatacgggaagcggcgactggtatacgcgaaaaaaacgccttgcaaaagcgcccgtccaaaagaaaccaaaagaggctgtacagcatgaagtaagcaagcccgaaaaaaatgcgatgaaggaacttcctataaaagagcagactgatcggttctatgagcttgccgggattcttgaatcctcgagcatattaggaaaacaggcagaagcctttcggagtaggattgagcggcttgaaaaccgccagtttaccttggcgttattcggcggattcagttccggtaaatcatcatttgcaaatgcgcttgtcggtgaatacgtgcttccgtcatcaccgacgcccacaacggctacgatcaacaaaataacgaaaccgcaagacggcaaaccgcataaatctgcggagatcgtttttaaaacggaggaggagctggacgctgaaatgcttcagctgactgagctgaaagatgctgatgtaaaagggcgttcactgaaagagagatggaattatgccattaaaaagggaaaagttccggatgaacttatcccggtgattcagacgatgctgcaggcgtttgatacgtacgaagaacagatccgtcaaaggctgacactgacggtgccggttgaagatttaaaaccgtacgcagccgaagaaaaaacggcctgctgcgtaaaagaagtcaccgtgtattatgattcgcctctcacgcaaaaaggcatcaccattgttgatacgccgggagcaagcagtataaacaagcgccatacggaacttgcctttcaatatataaaagatgctgacgcgttcttttatatgacgtactatcagcattctttttcaaaaggagacaggtcttttctgaagaaactcggcctcgtcaaagaatcattcggcatggataaaatgttttttgtcattaacgccgccgatctggccaaaaccgaaagcgagctggaaaccgtcaaagactatgtccgctcggaactctcaaaagagggaattaaccggccgaaattatatcatgtctcaagtaaagaagagcttgcgggtaaaaaagaagctttttataacaggttctctgatgtaagaaccgggcttgagcactttattgaggaagatgtaatgaaggccagctgcgcccagctgaaaacagaggcggacaagctgtgcgatatggtggaacagcttcacgaatctcttcaccagtcggcagaagaaaaagagaaaaagaaacagcgtctggagtcttcctatgaaaaagctctcgctgacatttcaaagcgccgtacgtctgaggtcatcattcgaaaagtgatgaaagatacggaagaacagctctatcacattaaacatcgcctgacgttttatgcgaatgatatgctgaaaaccgccttccatccgggccttcaaaacggcgattggaaacaaaatatatcagcggcgctgaatgaagcgctcaaggaattccgttttgaatatattcaagagctgaaaacgctcgatatccggatgaccggttttattgagcgccatatggctgaggaatggatggaaaactgtcagaagaagcttatggaagacggagatttctccatttatgtcagcggtgaaaacgaatttgccgttcagctgaaagaggtcgctccggtcattgacgtctcggcattctcacatcacgtaaaggaagttaaatcaccgaagcagttttttgaagagaacggaaaagcagcgtttgtggaagggctcaggcttagcctgcaaaaagtgacagaaaagtggcttgaacaggagaaagaaagcctttcagagcgatatgctgagcaggtgcgccgtctgcaagaagacatggcggataaaagcctgtcccagatccgcgagcagcgggacacttatttacaaggtcttgcggaaaatacgagtgcaagggaaattgaacacctttacgaagccgaaaaagcatggaaaaagaaagatgaaatgctgaaaatttaaaaatccggttggcgggcagataacagtcgtggtagactaaaatgaaaaaaaagcgagatgaaaccttttatgtcagaagtccataaagcaatttcagcacattccgcaaaacagcatcagcatgtcaaaacatttgtacagcttgattatgagcgtgaacaggccattgacgaagccattgtaaaatgcagacagaatcaaccgttcacgacagatgccatcaatggcatcacggcaaaaatgaaccagctggcgaaaaagggcatcgtgccgcaaagacgattcgtaagtgaagagatggtgaaagaattcgtcagcagacagtaatggatgaacctgccgcgtgtgtcatcagcgcttgctgtacatactatccgtatcttctctaaagggggatatgaccatgggcagaacaaaactgggaaacagaaatgctcagcagaataacaatgccaaaaagaaaaacggcttcggacagaaatttgattcttatgccggccgtgaagctgaaaagctgatggcaagcaataaaagacacggtgagtaaacgtgacggcagcatcttccaaatggggggatgctgtttttttaccgccttctttggtaaaataggaacattgaataaaaaggagtatcgatatatgaataataaattactgctcgttgacggtatggcgcttttgttccgctcatttttcgcgacggccgttcatcgcaattttatgataaatgaaaacggaattcccacaaacggagtcaacggttttttaaagcatcttattacagcggttgatacgtttcagcccacacatgtcgtctgctgctgggatatgggaagcaaaacgtaccgcaatgatttgtttcaagattataaagccaacagaagtgaaccgccgctagagctgattccgcaatttgatctggcgaaagaagcagcgcgagagctcggttttttaaacatcggcataaaaggctatgaggcggatgactgtatcggtacgctttctgccctattttccggggaagcggaaattacgattgtaacgggtgataaagatctgcttcaattgctgaatcatcaagttcaagtagcgctgctgcaaaagggtatcggcaattataaggtatatacagatgagatattcagagaagaaacgggagttccgccaaaagcgctgattgacattaaggcgctgatgggagacacgagcgataactatcccggcgttaaaggaatcggggaaaaaacggcgtacaagctgatacgtgaatatcaaaacatagaccgcttattagaaagcctcgctctcttgccgaagggccagcaaacgaaaattcagcaaagcttgaaagaattggagctgtcaaggcagcttgctgaaatacattgcgaggtaccgttagtctgtacgcttgaagaagcgcttttttcattgaagatggaagaggcggcattaatgctcagacgccatcagataaaaggaattgaaaggatgctcgaaaagctgaacgccagagagatcagctgatccctctagcgttttgtattgcttttttttgcgttgttttcaagggctgatttcgggtctttgtgcgcatttccttccatatttccctgaggattcacgcccccggtcagccggcctttattttcttttctcatagctgttcacctcatttgtaggatgaacagtgagacgcaatttcattccggttatttattcagccgaatcgctttttttgcgagctgatcggctgtttggttttgtctgccgggaatccacttaatgaaaaacaatggaaatccggcctttaactggatgatttcgtccacaaacggctggaaagccttgtttttaaccgcttcaagatctgcggcccgctccacgatatccgaatccgtccggaatgacacggactcaaatccgcgggcggcacacagcttcattccttcaattaaagcgagaaattcagcttcctgatttgaatggtcgccgatcggaattgagaaagattctgttttcccgtcatgtttaataaaaataccgataccggacgggcccgggtttccggcgcttgcaccgtctacataaatttcagcgggcatcatccgtcactctccattcggtgtcattcgttttgccgcatacgcataagggacagaaatgagtgataccgcaaatttaatcaggtaagttgaaatgaagatgctgaaccatacgcccgcggaataaacgccgataaaggccacggcagtgaagataaatgtatccagcagctggctgagcgccgtgcttccgctgtttctgagccagagaagcctgtctgaaggaaagattctccgaatggctgaatatacataaacatctatcgtttggctgaaaataaaagccaagaggcttccgagcgcaacacgcggcagaaaaccgaaaatcgtctcaagggccggctgtgcgatatctgaagcagccggtttatataaaagagccccctgcatggcgcatgtcaaagcgagcagagtggaaaacccgagccagacggctttgcgcgcttctctgggaccgtatttttcattcagcacatccgttgcgaagaaaacggtgccgtacatgatatttcccagtgtcgccgtaagcccgaacagctcgactgttttgacaacctgcaagttggcgcacaccgtggcgaaaccgatccatacgaataggcccgttttgccaaatcctttataaaacagaagaacaatgataaaatgaatgaccgcaaataagatccataacacatcgttaaacaaaacctgctgacttcctttcaatttgagaatggtttgattatagcacacgcccgtcaactaatgaatggtaaggtgatttcaatgaatcttaagccgtatatcgaaatagaagcaaaaggaacaggccctgtcgcgtttttttccgaagattggctgaccgttccgaaagcgcgcatgcttgcaagagaagtcagccgctttccttatataaaagacatttattttgaggatgaaaaaggcgcgagctggacgcttaaagaattagaaaagcttactgaagagcttgcgcacgaacctgacgacattacagtgtatttcgacggcggctttgacaaaacaagcggacgcgccggactgggaattgtcgtgtattattctctcggcggcaagcggcaccgcatacggaaaaacaaaagcttaacgcttcagacgaacaatgaggcggaatatgccgctttgtacgaagcccttaaggaagtgcaggaacttggcgcaagcagaaattcaatcacgataagaggggattccctcgtcgttttgcatcagcttgacggcagctggccgtgctatgatgaaacgcaaaacgaatggctggataaaattgaagcgctgctcgaatccttaaagctgacaccgacatatgaagccgtaaaccgaaaggaaaatcaagaagcggatgaccttgccagaaaaattctctcggaccggcagattgaaagccgcataacattagaaggtaacggagatgactgatattggataaaaaaagcatttataaagaattgactgagcttcaggatgaatattgcaaagactgtttcgtaaaaaagcattttcgcaaagagtttggaaaaacgcacgctcattctttctgcatcaaccaatgtacggtgggggagaagctgaaagcctacggcaaggtgctgacaaatcaataaaaaataaaaccgcagtagtttctgcggttttatttttcgaattcatcgagctgatgctggcaatcgtcgagaagcattcgctgcttttgcagaaaatcctggtcgagagcttgcagttcactggattgtgacatcgttctggcatcctgaatcgcctggtaagcagattccgccaaagttgaattttggccccgggtagccgctcccgttgttttctgggccgtttctaccgctaattcaagctggcgtttatccgtcagtccgtttggaaaaaattcagagtccattaaaaaacacctccgcaaatagtttggagatttttttttagaaatatgtacggaaaatagaaaaaatatataaaatgagccgatataactattgaacctgattaattagggcttaattactattattcagggtatcttgggagagaagggaaaaaccagccgtgaatgataatgatttaaaaacaatccttcagcagacatttaaagaaatatacggtgatttgggaaatttagcggaaatggcgaaaaaaggaatgccgtcaatggagaaacaaattgaagaaatcgagcagcgctgcaagcagaatcttgtcgcaattgagattcagacggcaatcaaataggagaggcatacgcctctcctctatttgtgtcatctgatcaacatgtattgagtttagagttttacaacattagaagcttgaggtccacgattaccttcgacaatttcaaaagaaacttcttgtccttcttctaatgatttgtatccgtctccttcgatagcagtgaagtgaacaaatacgtcgtctccgccttcaacttcgatgaagccgaatcctttttcgttattgaaccattttactttaccgttttgcatattgcttaattcctcctagtactgtagcaccttcgtgctaaaaaaaattttgtcatcattcaaccgtacgtatgtttacgttgttaaatgatggttcaactatacaccatatgggagcgggcgtcaagcggccgctctctatttttcatctttatttttccagtgacaaagcttatccggaaaaaaacaaaaagcacacgaatcgtccgtgtgcttttctcttacgataatgccatatccgccttttcggccatcagttcagattcttttataatgtcctgcaaaatgacttcagaggagttagggaggtgaaggcttttaatattgtccttcatccggttcagcttctcctcatccgcgagaagggaggtgacagactctaaaatttcttcgtggcggttgaccacgacagccgcaccgcgatcttcaaagaaaatggcgttttccttttcctgtccgggaaccggtttgtacaaaataacgggtactccgatcgccgtcgcttccgtcagtgtgatgccgcccggtttcgtgatcatgcagtccgtaatacggaacagctcgtcaattctttctacatagcccagcactttcagccggtcggcattgtcaccttccaagctgctgagggattctttcagcgagctgtttttgccgcataccaccacaacctgcacctgatcgtcatgaacgagattttcgcacagttcttttacgtttttcagcacaccatgcgctcccgccataataagaagaacttttttgtcgggagagagattgtattttttataaatcggctctttcggcatcgattcctcgaattgaggcctgatgggaatgcccgtgatctttacgttgttcgggtgagtgccgatttcaatcagtttttccttcacgtaatctgtggcgacataatatttatcaacattttcatgaacccagattttgtgaaggcagaaatcggtcataacgttgaacgtcgggatcacttttccggttctccgtctgtattccggtacgacaatcatcggaaatgtattgataataatgtccggcttatgctcttcgacgagctggcctaaacgtttatttcccattttaaaataaatattgaatttgcgtttattatagattttgtcaactccgtaataaaacaaacgataaaactgtttcccgattgagaagctttttaaataaaggtattgagtaacctctgaaacaatcggatttgactcttgatacaaattggaaaccgtcacatctaagccgagacgcagacactgttcgtagagcgttttggccacttgaacatgcccgtttccgtaatttgcagtcaaaattaatacttttttattggtattcaagtaaattcacctcaatgtaatcaacaacaagcaagcttcatgcatcgtaaggagttattgtctatagataaacataacacaagtgcatcattttataataagcgcggcaacatatttaaactaaatttaattgatatgttccattattttaaagttttgttatacgcatactgaatcaagagtattttatcatatttttgtcaccgtatcactcaaaacaaaaattaatcccattcatacggggtttcctgatatacgtaataattcagccaattcataaacaataacgttgcatgagctttccagcggttaacaggttctttcccgccgggtgcaaaatagtgcttaggagcttctacgtttgaaagatttctctctatgtctctctcatactcctgaagtagcgtatcggtatcatattccggatgacccgttaagaaaatctgtttttcgtcttttgaaacgattaaacagacccccgcttcctctgaaacgctgagcacatccagatccgaagccgattgcagctgctccgtattaatatctgtatgccgtgagtggggcacatagtatagctcgtcaaatcctcttaccaatctctcatgttttttaagaacggtatgctcaaacacaccgaagatttttttcggcagctccactttctcaatgccgtaatgatagtataaaccggcttgagcgccccagcagatatggagggttgaagtgacattcgttttgctccattccatgatttccttcaattcttcccagtaagaaacatcttcaaacggcaggtgctcaatcggagctccggtaataatcattccgtcaaaccgtttgtggcggatgctggaaaaatccgtataaaattcatccagatgctgccttgccgtattttttggagtatgtgtgctcggaattaagaacgtaaagtgaacttgtaaaggtgaattcccaagcatcctgaggagctgggtttccgtttggatttttttcggcatcagatttaaaatcacgatcttctgcggccggatatcctgatgaaaagcccggctttcatccattacaaagatgtgttcactttcaagcacctgcttagcgggcaggtgatttggtatattaataggcaacatgccacctccgttattccccgttaattttcttcattatagaaatttttaagccatttttcaatccatcccggcgtaataaaccgcatttaacgcataatgacagggataaaagcggcaaatgggcataaattcggagcggctctttattatgacgggtaaagagccgtttggttcctcgaaaaaaacgttttccgttaagtggaaggaaaaagcggtttccgtttgttttgcagtgtaaaacaggtaaaataaatgaagaatgtaaataggagggccgcagatgacaatttacgatataaacgtacggaccataacaggcgaagacatgatgctatcgacttacagaggcaaggtgatgatcattgtgaatacagcaagcaaatgcgggttcacatcccagctcaagcagcttcaggagctctatgatacatatcgggaggaaggtcttgaaatattgggatttccctgcaaccaattcatgaaccaagaacctggaaacgaagcggaaattcaagagttctgtgtgaaaaactacggagtcacattcccgatgtttgcaaaagtcgatgtcaatggagcagacgctcatcctctcttcacatatctgacggaacaggcaaaggggatgctcggcacaaaagcggtcaaatggaatttcactaagtttatcgtggaccgaaacggtgaagtcaccgggcgtttttcaccgaacgtcaacccaaaagagcttgaagatacggtgcagaggcttttggcccaataagaggtgatacggtgaacgaaaaagagcagctggaaagcgtcaggaattgggtcagagaaaagcttattaatgaacggacgggccatgactggcttcatatttcccgggtcgcaacactttctgtttatatggcaaaagaagaaggcgccgacttatttatcactgagacggccgcgctggttcatgatctgattgacgccaagctcgaaaaaagcgaaaggctgacggcaggcgaagtgacagaacggctggctgctttcaacatcgcggctggctccattcaggagatcgcggatattatcacgagaatgtcattcagacacagggaactgctgaaaaagcggccgctttcattggaggggaaagttgttcaggatgcagacatgcttgatgcgatcggcgcagcgggcatcggcagggcttttatgtttgccggcgcgaagggtcaaccgatgtacggaactcaaacaagtgtgctggcccatatagaggataaattaatcaagcttaaaggcttaatgaatacaaaagcgggggccggtttagcagaggagcggcatcaatttcttttgcagttcgccgcccgtatccaaaaagaggccggcatttgcaaaagctaagcggcgcaatagaacgcttgtgccgactatgttagaataagtgtcagattgcgcataggaggaccaatatgaagattaaatcaatagaaccgacgccgagtccgaacacgatgaaagtgattttgactgaagagcttccggcagggaaaagcaacaattacaaacccgatcaggcagatgatgctccggctgtcgtacgtgatattttaaacattgaaggagtaaagggcgtttatcacgttgccgatttcctggctgtggagagaaacgcccgttttgactggaaggaaattctgcctcaggtccgttccgctttcggaatggaacatacggagcagtctgagagccgttctgaacaggaatcgttcggtgaagtgaaggttttcgtacaaatgttcagcggaatcccgatgcaggtcaaattgacggacggcgaacgtgaagaacgcttcggccttccggaacgtttccaagaagccattttaaagctgcgttccgaagcttcaaatgtcgtatttgagcgggcttggaaagaacaaggcgtgcgcttcggagattttaccgaaatcggacatgatgtcacagaagagcttcaggccgcctacagtgatgaacggctcaaacgtctgacagaagcagccgcacagcaaaagggtgaggccaaaccggcagtgcagcggaaagcttataaagtgacattggagatgctcgatgatgaagactggaaacagcgctatgcccatcttgagcaaatggatccggatgaagacgatttaccagtattggaaaaggcgctgcatgatccgaagacttcgatcagaagacaagccgtcgtttatttgggaatgatcgaaaagccgtctgtgcttccgctgttatacaaagcgcttgaagacaaaacggtgacggtcagaaggacggcgggtgactgtctgtcggatctcggcgatgcgagcgccatcccggccatgatgaaatcgctcagtgactcaagcaagcttgtgcgctggcgcgcggccatgtttttatatgaagtcggcgatgaaagcgcgctggaagcattaaaagcggcggaagacgatccggaattcgaagtcagcctgcaagtcaaaatggcgattgaacggattgagcacggagaagaggcgaaaggttcagtctggaaacagatgactgaaagcagaaaaaaagaacagttataacaaaaaggtgcgccatgcaccttttttatttgaattcactttttataaaaattatttagaatattgttgaaaaatgattcaaaactctatatagtaagtacaatattaattgttggagggtttttatcgaaatacagaaagaatagaaaagcgagacagggcaaagatactgtaaaatttgcagaacgcgccctagaataaactgaaaattttaaaaataatgcacagtctaaaaacagtagggggatcaccatggcagaattacgcagcaacatgatcacacagggaattgacagagcgccgcaccgaagccttcttcgcgctgccggcgtaaaagaagaagacttcggcaagccgtttatcgcggtctgtaattcatacatcgatatcgttcccgggcatgttcacctgcaggaatttggaaaaatcgtaaaagaagcaatcagggaagcgggcggtgtgccttttgaatttaacacgatcggagtagatgacggaatcgcgatggggcatatcggcatgagatattcgctgccgagccgcgaaatcattgccgattcagttgaaacggtcgtctcggcgcactggtttgacggaatggtctgcattccgaactgcgacaaaattacgccgggaatgctgatggcggctatgcggattaatattccgaccatttttgtcagcggggggccgatggcagccggccgtacaagcgacggccgcaaaatttcgctttcttcagtatttgaaggcgtcggcgcatatcaagccgggaaaatcggtgaaagcgacctgcaggagctggaacagttcggctgcccgacgtgcggatcttgttcgggcatgtttacggcaaactccatgaactgtctgtctgaagcgctcggtctggcgcttccgggcaacggaacaattctagcaacttcaccggagagaagagagtttgtgagaaaatcagcggcccaattgatggagaccatcaaaaaagacattaagccgcgcgatatcgtcaccgaaaaagcgattgacaacgcgtttgcgttagacatggctctcggcggctcaaccaacacggtgcttcatacgcttgcgcttgccaatgaagctggggttgagtactctttagaacgcattaacgaagtggctgaacgagtgcctcacttatcgaaattggcgccggcctcggacgtcttcattgaagatctgcacgaagcgggcggagtctcggcggcccttaatgaattggcgaaaaaagaaggggcgcttcatcttgacgcgctgactgtaacaggccgcacactcggagaaacaattacgggtcatgaagtaaaggattatgacgtgattcatccgcttgacaatccgtttaccgaaaaaggcggtttggccgtcctgtttgggaatctggctccggacggcgccattatcaaaacaggcggtgtacaggacgggattacaagacatgaaggtcccgctgtcgtctttgattcccaggatgccgcgcttgaaggcattataaaccgcaaagtaaaagaaggagatgttgtcattatccgttatgaagggccaaagggcggcccgggcatgccggagatgcttgctccgacgtctcagattgtcggaatggggcttggcccgaaagtggcgcttattacagacggccgtttttcaggagcgtcccggggcctttcaatcgggcacgtatcgcctgaagcggctgaaggcggcccgctcgcattcgtagaaaacggcgaccatgtcatcgttgacatagaaaaacggattttggacgtacaagtgcctgaagaagaatgggaaaaacgcaaggccgaatggaaaggcttcgagccgaaagtaaaaacaggatatctggcccggtattccaaactcgtaacaagcgccaatacaggcggaatcatgaaaatataaaacagaggcctgaacaattgaattccggccccctctatagtatccttgacttcatataaggattttagagggggcttttttatgtcaatggcttatgaagaatatatgcgccagctggtcgtgccgatgcgccgtgagctgacgggtgcgggttttcaggaattaacgactgctgaagaagtagaaagttttatggaacaggcagagggcacgacattggtcgttgtcaactccgtgtgcggctgtgcagccggtcttgcccgtccggctgcgactcaggctgttttacagcatgaaaaagcgcctgaccatacggttaccgtatttgccggtcaagataaagacgcaactgcaaaaatgcgtgaatattttacggggcaggaaccttcctcgccatcaatggcgctgttaaaagggaaagaggtcgttcattttattccccgccacgaaatcgaagggcatgacatggaggaaattatgaaaaatctgacggatgccttcgatgcgcactgctgaaatgcccgaattccgggcattttctttttggagaaaaaaatgatcacaacgagttacagaccaagcgaatatacgatacacacagcgcagtcactcagtgtcaagctgggtgacacttactgcagccgcaataaacagcccattgaaaaaatgctggaacgagcggctggcgatcttttagtcatcggaaaggaacggttcgaactttacacgaagcaaggggagaagttcttttttcacccgaatacagcgatgttccgcgcaaagcggtttttgagaggggaagctgagccgttgttaaaagcagccggattacgcgaaggggattcctttttagattgtacgctcggcctggcatccgatgcgattttggcaagcctggcagtcggaaaaagcggacaagtcatcggcctggagaaaaacaagcttgtctcattgcttgtagaaacaggacttcaaacgtgggaaaccggaatgcagcagctccaaaccgccatgaaacgcattcaggtcaaacatgccgactgcgccgattatttgcgggagcttcctgattcatcggtagatgtcatttattttgacccgatgtttcacgaacctgtagaaacgtcagacggcattgcaccgctccgcgcgctggcagaagagggttttaacgaagagtgcatcacgcaagccgtccgggcggcgaaaaaatgcgtagtgcttaaagaccattggaaaagcccgcggtttgaacgatacggcttcaaggtgctgaaaagaaagacggcgcttttccactttggtgtcatccatgtgagctcatgatatcatgggcttctttttcgttaatcagtgatttccataacgacaaaataaagcagcgtgagaagtgatacagtcgcaaataaagcgttaatcatctcatcccctcctttttctccttcttattgtaagcggtttatccgctcggtcacagttaccaatttcccatattgcatgataatacgctgccggacatgacgccgcgctttcatctatgctaaaataaaggaaaagaggacaataaaacagaggggaacaatctgtcatgaaattgtggatgaaaaagacccttgtggttctgtttaccattgtaacgttcggactcgtgtctcctccggctgctttgatgacagacaagccttcaggacagtcgagcagtcttgagcagaatgattacaccgctttttatgatgaacacgccctgccgggagaagagaaggcagggcgggagcctgaattactgtttcaatcgtatcagcagcagcttctcggtgatgctgaaaatcaatcatttttaaaattcggcagcaaaatctctccggtcattgaagatgattacagaagtgaaattctgccgaaaatcgaagatgtgatcacaggacatttggccaagtttcaagatgatgaagcgtatcaggatgtggttatttccagcaaaccgtcggccggaaaaactgaaaaaatttttcatgtgtataacaggctgacgggtgaagatcttttaaggttccacgtccgccgggatcatcctccgcaagacggctactggtttaattttcattaccatactgctgaagacggatttcaatcacatcatgagcttggcagcatttactgggaccgcaatacgccgcctgactggatgagcgtgtaatagcgagaagaaataaaaaaatcatttctgagaaattttgcagaaatgattttttattgtgttacactactaaaagactactttaaaaggatgaaaaaaatgaaacaatataaagatttgtgccgtcatgtgttagaaaacggagaaaaaaaaggagaccgtacgggaacgggtacgatcagcacgttcggctaccaaatgcggtttaaccttcaggaaggtttcccgatgcttacgacgaaaaagctccattttaagtccatcgcgcatgagctgctttggtttttaaaaggagatacgaatgtccgctaccttcaggaaaacggagtccgcatctggaacgaatgggcggatgaaaacggagaactcggaccggtttacggttctcaatggcgttcatggcgcggagcggacggcgagaccattgatcaaatctcccggctgattcacgacatcaagacaaacccgaattctagacgtttaatcgtcagcgcctggaatgtcggcgaaattgatcatatggcgcttccgccttgccactgcctgtttcagttttatgtcgcggacggaaaactgtcgtgtcagctttatcagcgctcagcggatgtctttctcggcgtgccgtttaatattgcgtcttatgcgcttttaacaatgatgatcgcgcatgtgacggggcttgaaccgggtgagtttgttcatacattcggagacgtccacatttaccaaaaccatgtggagcaggtgaatttgcagcttacaagggatgtccgtccgctgccgaaactgcggtttgcgcgaaatgttgattctatttttgattttacgtttgaagactttatcattgaggattatgacccgcatccgcacataaaaggagctgtcagcgtatgatttcgtttatttttgcgatggatgaaaaccggctgatcggaaaagataacgatctgccttggcaccttcccgatgatctcgcatatttcaaaaaagtgacgacgggtcacaccattgtaatggggcggaaaacgtttgaatcaatcggacgcccgcttccgaaccggcgtaacatcgttgtaacctcacgggacgaatctttattcccgggctgtattactgccgactcggctgaggaagtgctcaagctgatcccggcggatgaagaatgctttgtgatcggcggcgcccagctgtacagtgcgctctttccttatgcggacagactctacatgacaaaaattcaccatgtctttgaaggagaccgtttttttccggaatttaatgaagctgaatgggaattgacatcccgcaaacagggagtaaaagatgacaaaaacccttatgattatgagtaccttgtatacgagaaaaagaattgatttaagcagggggacaagaattgattcgttacggctgccttgtgatgtacgttgtatttatgttcatgaaaaatattcaggaatatatcaatcaaaaagagcttgacccgcggctttcttttcaaaaacagatgaggctggtgtatgagaggccgaaagcctttatgagaggctgcattgacgtgtcgggatcggcaatcggcattcatcatgatcagccgataccggacggccccgttttgtatgtgcatcccagattgcacccggctgatcttctgctgcttgcgggacatcttgaagagccggctggttttatcgctggcgagaaagctttccggatgccgtttctcgggaaatggctgcggctgatgggtatcatttgtgacggagacagccgggacgccgtgtttcaggaggcggaagtccgtctgcaaaaagggcaaagtctgattctgtctgaagacggcaaaatcaatccggaggaaatggcacttcgtttcgatctcccgattgtgcccgtcagcacttcgggaacagaccggctgctgcggggcagattactgaaacggctgaaaccggctgacattgaattacatataaagcccgcttattatccggccggtcagaaacggctccgtgcataaaaaaagcacagtctctatagagaggctgtgcttttttatttcagataaagggaactttgacgcaataaaacaaaatacagaaaaacatcgaggcgctgccgcctaaaacaaaactgtgccaaatggcgtgatgatacggaacctttctccaaatataaaatattgtgccggcggaatacaataagccgccgaaaagaagaaggccgaaaccggggcctgacagcgaagcgtacagcggtttaatggcgacgatgatcagccagcccatcaataaatagacaagcgttgaaaaaatgataaaccgcttcacgaaaaagattttaaacacgatgcctccgatggcaagcgaccaaacaataattaaaagggtcagaccgagcgcccctttaaggggtcctaataaaaatggcgtatatgttccggctattaatacgtatatcgcggaatgatccacaatttcaagaatgtctttcgtttttttatgctgaatgctgtgcaaaagagtcgagctgagatacagcagcagcattgaagcgccaaagattgaaaagctgacgatgtctgtcggcgatccgtatttcaccgcgaagataatgagaaaaataagcgccggaatcgacagcaatacaccgattccgtgtgtgacggcatttgcgatttcttcttttattgtgaacaatcaaatgtcctcctttttaaaggatttgtttttgcagtgactgcaaaaagctcaacccttctaatgtaatttttgttcctgcgcgtcctcggccttttgtcacatagtgcatcttttctaagtaatcaagcctgtttctgacctgctggggcgataatgtcattgtgctgttttcgcttaattcggatatgctccgtctgctggcgggttcgccttttgtatttaagtctttaattgattccaaaataaacaaaaactcttctttctccatcaatgtcagccgtttttcttttttcttagctgttttcgctttctggctgtttttgatatacagcgggacatcatcgggataaatcgtgctgccggatgctgccgcggccatatagtacgccgcattttgaagttctctgatgttgccgttaaaggtgtgccgctcaaacagcggataaacggacggatcgatatgaacatgctgcccggtggctgtcagcatatgctgcaaaagaagcggtatatcgctttttcgttcagataaagcagggagcggaaggcataacacgtgaagcctgtaaaataaatcttggctgaacgtattttctgcgccggtatcgccaagatccgccgtgctgcttgcaatgatgcgggcggaaattccggcgtccagctcggaaagaaggcgggtctgtaccgagagcggcatgtctccgatttcatataagaataatgttccgcggcgggccctgtttaatgcaccttcagcgctgaacagttcatattcgagccgctcttcgttttggctgcagtgaacggtaataaatagttcgctgtttctgcgggatttatgatggatcgctctggccatttgtttttttccggttccgacttcacctgttatgaagaccggcaaatcagataaggcaaattgcgaggccaatcgtttcgcttctaaaaaggtttgatgttcgccggccagctgataaaaaggatcagtttgttcaattacactcatgaattggctccttttggttctaattggtttaagtataacacgtttgtgcaatcgaaaatatctttttctcttgtatcggttcatttatttttatttacaaaattaaaataattatcttattgtttgaatattcatgttataatggcatattaaatagggatttaaataagaaaggactctgtaaatgaaaccgttgcttaaagaagactctctcatccaggtaaaagacattttaaaagcgcaccaaaatgtaaaggacgttgtgatacatacgcctttgcagaggaatgacagactttctgagaggtatggctgcaatatctatttgaaaagggaagacctgcaggtggtcagatcatttaagctcagaggggcttataataaaatgaggcagctctcaaaagagcagactgaaaacggaattgtatgcgcaagtgcgggaaaccatgcgcagggggttgcgttttcatgcaaacacctcggcattcacggcaagatttttatgccgtcaaccacaccgagacagaaagtatcccaagtggaactgttcggaaaagaatttgttgaaatcatattgacgggtgacactttcgatgatgcgtataagagttctgcggaatgctgtgaaaaagaaaaccgcacgtttattcatccgtttgacgatcccgatgtcatggccggacagggaacggctgccatcgaaattttaaatgacattgacgttgaaccgcattttctttttgcaagcgtagggggaggaggactcctgtccgggctcggcacgtacatgaaaaacatctcgccggatacaaaaatcatagcggtagagccgaagggcgcagcctcctattttgaatcgaaaaaagccggacaagtggttgaacttgagaaaatcgataaatttgtcgatggggcggccgtaaaaaaaatcggcgtggaaacctttcaaacgctcgaaaccgtcgtcgatgacgttgtgcttgtcccggaaggaaaagtgtgcagcacgattctcgaattatataatcaatgcgccatcgtagcggagccggcgggtgcattgtccgtgtcagcacttgatctgtacaaggaagagattaaagggaaaaacgtcatctgcgtggtcagcggagggaataacgacatcggcagaatgcaggagatgaaggaacgctccatgatttacgaggggctgcagcattattttatcgttaatttcccgcaaagggcgggagcgcttcgcgaataccttgatgaagtgctcgggcctgatgatgacatcacccggtttgaatacacgaaaaaaaataacaaaagcagcggccccgcattggtcggcattgagctcaagcatcgggaagattacggcgcgctcattgcccggatgaatcaaaaaggatttcattacgtagaggtgaataaagatcaggatctgtttcacctgttaatttgactttttttagaacggccgcgcaaaatgacagacacgctttctcagattgtatataataaaaagaaaacaatcgaaaaagaaggattgatatcttgttactcaaaagcctagagttcaaacgacaggacgggattcaggtaaaagtgacagaaataccggttgtcacggaaggtgaacattatttttttcaaattcatcagcaccttgagctttatttgagagaggtttttgcttcacaaagtgtgagaacagtgtattcattccgacaatatgtcaagcgccgtatgaagtggaaagattacgaggccgttttcaaccaagagattttaaaacataacgcataacggtgcatattccttagcgccttccttttgataggggagggtgcgggaatttttttatgatgaatgctgtaagcgttttatccatgggggggaatggaaatgaaaaaaatgaaaatcttcgctgccgtcttttgtttgctgctcttgtgcgcctgcggggggaaaacgataaaagacccgctgaactatcagattgaaccgttttcatatcagaaccaagacggaaaaacagtgtcactgaaaagcctgaaggggcatgtctggattgccgactttatgtttacaaattgtaatacagtctgcccgccgatgacagcccatatgaccgaactgcaaaaaaaactgaaggctgagaacctggacgtgcggattgtgtcgttcagtgtagatcctgaaaatgataagccgaaacagctgaaagcatttgcttccaaatatccgctttcgcttcgcaactgggattttctgaccggttacagccaaaaggacattgaagattttgcgctgaacagctttaaagcaatcgtcaaaaagccggagggagaggaccaggtgatacataaaacttctttttatttagtcggacctgacggcaaggtgcttaaagattatgacggtgtgcagaaggttccgtatgatgatatcctctcagatgtcaaagcggctgaggagctcaagtaaactggcagattagacattttcaaaactgaaaaaacatgttacactttccactagtagacggggaaggagcaaccagattgaagctgcgaatgttttcattgatcgccggactggctttgcttttatcagcatgttctgtccagcgcaccggttctgacgctgcagaaccgaaaacgaaagatcatattgtcatagctgcggtcggtgattcattgactgaaggagtaggagatcctgacggttcaggatacgtcggcagggcagcggaatctcttaagaaaaagggacatgtgaaaacggtagatattaaaaattatgcggtgcagggcgacaaaacgtcggacctgctggaaaagcttgataataaaaaagttcagaaatcattaaagagcgccgactatatcttttttaccatcggcggcaatgacttaatgaaggtgctccgccagaatatgatgcagctgacggttcagccgttccaaaaggaagagaaaccttttgaaaaacggttcaaagcgatcgtttcaaaaatccgcaaatataatgaaaacgcagagctggtgtatgtcagcatgtataatccattcacgtttacgctgcctgaattaaaagaaattaatggggttgtaacggattggaacaagatcgccgcaaaagagctggaaaaagatcctcacgccgccgcggtgaatgttgaagacttgttcagtcaaaaaagcggcagcagacggatttcaaaggatgatgattttcatccgaacgcaaaaggatatgcactcatcgccgatcgattatacggcatcattgaaaaacaagggttaccagcagaatagggtgaaatgatgaaaaagtggaaatcgctgttttttgttcttctcgcactcaatgtgattgccgccgcggtaattgtgacattattggttatgccgggagagcaggcgaaaatacaagatcagacaaaaagtgagtacggctttcatatcacaagctccaaagaatctcttgccaggtttgtgaatgcgtacttaaaagagaaggcatcgaatcagcttgactacaaagtggacatcaataacgatgtgcacgtggcaggtaaaatcaaagcattctcaacctccattaatgcggtcgtcacatttgaaccgtccgtacaggagaacggagatgtggttttgaaagtgacgaagttttcattaggcgaattaagcctgccgatcagctttgtgctgaattatatggacagcttttatgaactcccgtcatttgtgcacgttcattccggggataaaagcatcgagatccgtctgtcagaaatgcctttagacaacggcatgtatgtaaaagcggataaaatcaatctcgacacggatgaaattgaattttcctattatcatccgaaacaataagtcttcataaaaaaacacagatcctttcagggatttgtgttttttcgcgtcagcgttttttgtctagcttgctgaacagtttgattaacgttgcaagctcttcatcagagtagcagtcaaaccgtttaaaaaagtattctgtttttttctggttgaaatgatcgacaattttctccccggcttccgtaatatggattctgataattcgcctgtcctctttagaacggatgcgggtgatccattccttttctactaaagcgtcggtcactgcggtaatgtggcttgcggagacctcaagaataggggcgaattccgttacttttttaggcccttgttcactgagaatccgcaaaatggtgaattcgttcctggacagctctttatctagaatttcattaacttcatttctgatttgtttaaacacttttcgaagcaaagcttccatatcatacatcatttgtgtccttactttcaaatcatgaacctccaatatgtagtcagcgtggcattcgtttagcttcccctgaaagcagaattatttttattctgtttatacatgctataatataataataccacgtatgaacaaaggagggcacccgtatgtcagaaaaaaaagaaatcgccacatttgcaggcggctgtttttggtgcatggtgaagccgtttgacgaacaggccggaattgaaaaggtggtgtccggctatacaggaggtcatactgagaatccgacttacgaagaagtgtgcagtgaaacgaccggacacagagaagccgttcaaatcacatttcaacctgacatttatccgtatgaaaagcttgtcgagctgttttggcagcagatcgacccgactgatgcaggcggccagtttgcagaccgcggaagttcatatcgggcggcgatatattaccataatgatgaacaaaaacaaatcgctgaagcctcaaaaaaacagcttgaagaaagcggcatatttaaaaagccgatcgtgacagacattttaaaggctgagcctttttatgaagcggaaggctatcatcagcacttttataagaaaaatcctgatcactacgggcgctaccgtgtaggttccggacgtcaaggctttctggatgagcattggagggacagataagatggcttttaataaagaagaaaaaatcaaatcattaaaccgtatgcaatatgaagtcacacaaaataacggaacggagccgccgtttcaaaatgaattctgggatcacaaagaagaggggctgtatgttgatatcgtatcgggaaagcccttgtttacttctctggataaattcgattctcattgcggctggcccagttttacaaaaccgattgaggaagaagaggttgacgaaaaactggacacaagccacgggatgatccggacggaagtgagaagcaaaacagcggattcccacttaggccacgtatttaatgacggcccggggccaagcggtctccgttattgcattaactctgcggcactccggtttattccgaaagacaagctgaaggaagagggctatgaagcctgcctgcatttatttgaaaaatagagctcagcaatgaggcctgcctatcagacaggccttttttctatgtttttttttcttcatgtaatcgttcaataatctttacgattgtgtcttttgtgatgagcggcgcttgatcggattgatatctggggagattgaccttccgaaattccggatgtttggcggggtcgggcaatatcgcgtaaagattgccccattcatataaagattccgtctcatgaggagaggtcagttcttcatgaagcttctcaccgggacgttttcccacttcaacagcggcggggcgcggcagcccgtgccgggacgcatattcctcaaacccgtgaagcagttcttcgagcctcagggactccattttaaaaataaacgtttctccgccctttgtaatcgccgcagattgcagggtgagcgttgcggcatcatcaatcgacataaaaaacctcgtcatgtttttatctgtaatggtgagcggaccgcctgccatcaactgctcaaataaaataggaataacggaaccgcgtgaacctagcacattgccgaagcggaccgaacaaaataccgtaccgcggttttgaacatgatgattcgcctgatgaaacagcttctcggacaacagcttcgtagctcccattgtgtttaccggggaaacggctttatcggttttttaagatatttactgcattttgagggactatcagtgacggtgaggtcgaaaacgaaaaattaaacctcaggataggggtgatttcaaactgagccggaattggcccttttcttttttgtgtcatagtaacgataacttctttgaagaccattcttagtagcgagttctttttttctgtgcttgattcaatgtgatattgatcaattatcttatttatgttgtttctgactgtattactgtctatttctgattgcgcttcttgggttccattgagctcatgcttggcaatctggagttctttaaattcttcatctaaaacagcttttctcttcaaaaaaagttcatcagtgtaaatgccgctctcatatttctcgaagataaaattctctttgttttttaactcttgttctttttgtgagagatgttcagacatttgcttttttgttttcacattactatttacgtcttcgtatttagaaatcattgaaatgatatgttttgttaaaatcttattatctaagttgcttaaagaagagaggtaatccagaatggcattttcaacatcgttatatctcacataagtgcatttattctttttgcaagtgagtgatttaacgtgatatacactttccgtgccgtttttgttttctcgcgttcgcctagtttcgtatttagataatggttcaccgcacttagaacaagtgcatacgcctgccaattcacttaattccaatgcgtttttattaggcagcagggggactttgtttgcaattttctcttgtgattgttgaaattgttcttgatctattataggggcatgtgcatccgatactacaatttgttccttttcaggtctaattattcgtttaccgtcttttgttttttctctaaccttatatttaacagttccgatatacgcttcgttttgcagaattgctttaattgtgtattgattccagcgcttttttcctgatggagtcggtatttgtaattttgttaagtgagaagcaatcgctgtataactataatcttttccattcaacccatttaaaaagaggttaaagatgaattgaacgacttttgctttttcttcgactgggactagtttggatgtttttttgtttaaccggtatccataaggcgctagtccggaaatccatttcccttgtgccgcatatgtgtatttagcgcctgtcatacgctctctggtcatttcaaattcttctctggccataaacaattcaaaacgaatctgacgcatgtctgcaggatttcgagggtcataaactttatatggtgtaatgataatcaatcgcttgctttgaagaaggttaacaatttgtcccgcatcactgtagctcccgcggctgagtcttgttatttctttaacagcaattgcctggtacttgccttcctcgaggtctttaagacattctttaaaaacagggcggccctcaatgctttctcctgacccgatttccatttttaattcataggcgatttcaatcgacttcagtattttattcatgagttcattttgttctgttagcgtatcttcgcctgttcttttttctcgctccatatcctgacgagagcgtctgagataacctaaaatatttgtaatgttgtaagaatgaacgatgttttttaactccaaaaaatcagcacctcctctttattgtatttactgtaaaaacagaagtattcgtacaatattctgtctgacattgaatacgaaaacaacctaatatattgtaaggattgtattgtttgaatattgatctattctaatcggattcattttttaattaaacgccgactgtaattaacagggtttttattttgttcatttcttgaaatgtcaacgcaattcattagtggcagataagaatgtgcgacaattcttcaaatcagtttcatctgaatgtcctgatattaaatagtgaaacgggggccgcagagctcgctcatacgctttatgtttttttgtttagcctaagaaaatatacaaataaaaaaagaagccccagaggacttcaaaataattaattcttctcacatgcaaagttgtcattatcccgatccattttagatgtataagcagggtgagtgcttggtacaccatgcggatatttctttctcagctctgtgcagtttgcaaagtgttctgttcctccagcagaaggggaggcttgtgcagagttagaagagctgcttgatgctgaactgcttgagttcgatttatgtgtctcggattggcgtgttgtaactgacttttgagccggcttagatacacttactgatttcttcggtttcgtttcgcagccattaaatcctttatcagtcgcatatccattcttactccaaatcttcaagtctttatctttcgcagcttgctcatctttcttatacgtgtctaaatacttcgtgtttggctcatatacataagctactcgtgctaatccttctttaagcagtgtttcttgtactgatttgccatctgcataaacgtaagccagcattctcccatacttgtctgtacgatctcctttatcaaactccagttgaagttttcccttgttaaccagctgtttgtttcttgctgaagcatcctcaccatatggttgtacgcaagagtttgggctcttagttttaggcgtgtcaacaagtaaataacgaacagttttgacgccgcctttatagttaactttaatcgtattcccatcaactgttctgttaagtgttacatcgaccagctttttctttttgtcagacgcctttttatccgacgaatccttctttgaagcattttcggctttttcattgttgtcatttgattgggtgtctgcctttgtctcttttgcatccttttcttcttgctgcgttgttttagctttatctgaatctgttttatctgtagaagcagaatcagatccacacgcagccaaagaaaagcttagagatagtgcgccaatacctaacagccatttcttcaatgtaattcccccaatttgtttgttctgtctctatatcggacaaaccttccttattataaatataaaaccaaagattgtaaattctgttttggcattttaggacactaaaatacagttgtgtggtaaaatttagtggcctaaacaccttagaggagggaaatttaaatggaagaaggaaagttaattcgcatgactcttgatgggataaaggaagctgtttctaaatacggaacttttcctatgctccaacatggagggcatgtcatggaagatgctgcttttcaattcagagacccagccagtcctcaagaaattagtagtttagaaaagatgttaggggtaactttgcccaatgattataaagagttcctttttaatcacaatggaatggaaatgtttaatggtattgagcttcttagtacagaagggataattgaatttaatgaagttcaagacttccctaagggatatgtcctaattgggtaccattatgatggcaggtatgttattgatgtaaataaatcaaataaagggttggggtatatgttgcatttggattcaattgataatattgaagatgcggtatatttagactctaactttgagatatggtttgacatgttggtgtcatcaaacggaactaaatactgggaagtgaagccggaaattcaagagtattataaatatgtttcagaataaaaagtttagataagatcaagtggaaaggagacgtaaatgaaagtatttgaagcagcctcgtttatttcagccgcggaaaagcgggtaaaacaatacgatcaaattagagaacaatttatcaatctcagaaaagcgtttcagggaatggctgacttagacgacagtgagttttcaggcaaaggcgcagacaacattaaagcattcttccaagatcacgctggtgttacagacagctggcttaatctgatcgatatgaagattgcgtttcttaacagtatttcaggaaaagtagctgatgccagattggccgattcgtttgtggaagagtcctttttagaacacgagctgatccatgcgaagaataaatcacaagctatcatgcaggagcagcgcaatgaaatgaaaggtatccttgatgaaatcagcgatattattcatcttgatgttttctctacagaagatgtcgatcaaaagcttgagtcagcagataaaaaaaggaacgataccatacataaactcggaaagcttgatcacgatctaacgaaagaatacgcagaaaccgaggcaaatgaacatttcattcaggcagattttcagcagcttcaaaatgccacgggtaagggggaaaacgccactccgcttcactataatgccgaggcgtacagagaaagtgacatccataagaaaaaaggcgagattacaagacactcagacgcctatttgacgattaagaaggaagaagcgaaagagcgggaaattaaggatctgaagaaaaagctcgctgatggagtaactgatcctgatgaatacttggagattgcgaagaagatcggttacgagaaccttgaaccttcccagcagcaatatgtgattaagcttgaacaagcaaaacagatggaagaagccggagaagtgacttgggatattttaaaaggagccggcgttggcctttatgatgtcgggaaagacacggtaaccggtttatgggacttcataaccgatccgggggaaacgctgtcagcactggggaatgcagtacttcatcctgttaaaacatatgatgctgtttcagcagcaatcaaggaatcgtatcaaaaagatatggtaaatggagatgcgtattcccgatcaagatgggtgacatatgcaattggttcagcagctgtggctgtcgtcggaacgaaaggtgcaggagccgttaacaaagctgatgcggcggggaaggtcataaacaaggcagggcaggcagggaagaaaattaaagacgttaaacttccagaactacttccttataactctaaatatgatcttgctctggcgggtgacgtaccatacaatgtggttgacagccaaaaccttaaaaatgaacttttgaccaatgcaaagaaaatcccggatggaacgagaaagccatttactggtcagaaagtaaatgtcccttggttaaataaagagaagtatgaggcctatgaaatagatggcaaagtaaaaacaaaagggaaaattagagatgtaagccgtagggtatatacaatgaaagatattgatcttaatcaaaaaaatcgtaaaggccttacgaatcttcaactgatgaaaaatggtaacgctccgtttgcaaaagatgggacccaaattaatttgcatcacttgattcaagaagaacctggaaatatgctcgagatacctgaaagctggcataataagtacagtgatgttttacatggtttgaaagggaatggacagagttttagaaatgacccagtacttgataaacaatataaaagtttcagaagaaggtattggagatggagagctcagcaatttgagaaccaagaataatgaggtgaaggtttaatggattattcaaaagtaaaaactttctttgatgaaaataaagaaaattcaattctcacaggaggtgttactgaagatcagattaaagaaatagaagaggatctcaatgtaacccttccaggcagctataaatggtttttgactgagtatggttcagggggagcatacgggactatgatactcggttatgactctcacggtgctgaagttgtcgaacagaccaatgaatataaaaagtattataacctttctgatggtctcgtagttatcgaatatgtagatgaattttcttattgtcttgatactaacaagatgaaaaatggtgaatgccccgtcattctttgggataaccaagagggatatggtaaacaagttagtagcacattcctagagtttttaatagaggaactagaagaagcgaaagacgactggattgaggatgaagactgggacgcttaagcaaaagtattacacttgtgtgatctataaaaaatggttttatccaataaataatttttttgtaaataactccaatggtttcgtttaatctgttataatcaaactgtaaaatataaactggttatagtgtatttctttaataagaaatgcataaaataaaaagagtatggtgttgatcacaccccgtcaaaaggcttactcgatgcggtttcttagtagacctatcccttcaggttttgaggcttaagggaggtctattttttatttatatatgtcaacagggcggttataaacgacccgaatgcaagcattaacattaatgcctgaaatggtgacataagcatcacccccctttctatagggagtgagcaagactcccttaagtgagcatacttaatgtacaggaatcatttatatgtggttaaaaacccattcagttactaaaatgaaaagaaccatgttagaatcaggttctttttttgtatttaagttaaatacctcgctggaattaccaataaataacatgtgaaataatactaaacggaagaaatttgttatacaaaggtgaagcaaacatatacaaattatgatgctatacttgggcaaaacaggatagtgataggatgggacaaatatattgaaattccaatgaacgaacttccttcaaatgagattcaagttgaaggacttgggaaaaacatgaaaatcatttacagcaacgttgtaaaatttgagagagggtgaatgttatggaaggccttaataactcttacaacattacgaaagaccctaagtttttagcattttgcagtttagcgacagaaggcgcaggaagtaattcgaatcaccaatgttcaattaattttgatgaatttaaagatgcgctcgagaacggaaaagtggttgataatcaaaaccttaaaagcacttcagaattaaatcaccagttcgattactggaaatctagaataacgggtggacgagctgtaactgaaacagataatcaagtgctggatatcatcaaacaagcatacaatcttggaatggtgacgaaagataatatgcttttgagaaatcaagccattaacgcgtataaaacatctatttaatttaaaattaaagccccttcctgaaaaaggggcttttgctttgcaacttattctttatgtttaatctaaaaccataaagtcctgcacttttgtttcttcttcaggcaaatcaaattcattaagtttctttttagtacgaatatcaaaaatccccatatagccaccaatgccttttttattttcctcttgtgaaatcacataaagtttttgatttttaaactttgcattcatatacggaaattttaaatcgaatttttcaaaagaaaaatctttatcgtactcaagtaagcaggcgtatccggatttattaatatatgtaacgtaaaatttaccgctttttttgtcgtaatacacagcgtccgcttgttcgagatcatcaggatattttatgaattttgatttccatgatcctttttcgattacagttagttcatgttctgagctagccacaacatatttttcagagtgatcaaatacatctccataggaagctaatccaatcgttttaataatctcttctgtttttctatcaatgacgtacaaagacatttcttgaatgacgtaaatatacttatcatcgctttctcccatggttactagggagggcaaagtcaggctatattttttattgaactttttatcatttactttcagttcatttccatttgtgtcgacattataggcttttacggaaatatcctctccttgataccaaaaagcaaatggattggacaattgatgttccttaatggtgttgttttttaatgtgtaataatatggttcatgttcagctaacaagacgatatcgtctgaagagggggtttttttctggatatatggtatatccggtaccttaaagtatcgtttattgaatttttctccttgggatgtggatatgagtacgcttttcttgatgagtggatttgaatagataaaaaagattttatcctcggttggattaattttagaagtacttacagagtgttcacctttatttataaagaatgcattgatcaacaatataactattgcaccaattagaactcctgaaatcccatataaaacataagactttttcatataacgctccttatcttttatataaaataaaaagacacttgcagaataaatctgcaagtaaattaaatgattaggagcagacagtttttgatgagcggtcaatatccagatgtgacaagtgcttctccattacttgtttaggtctgttccttttgtatttttgtatgattgccacacaagtttagagcaatactatttatttgtgcttttttggttgcagctttactaccaaggacagcatttcataaagttttacaggtgaacacagatcataaaaaaacaccccctatgcgggagtgccaaaacatttatgcggtttgccctcggcgttccgctgagaagtcattatggtgatcaagcgcgatgtggatactggctgtatggcctcttcgggcttctttaaaaactttgtggccgtcaagaagataatgtccaacaagcccaagtaagataactaaaaagataaaagccgatgcaaatttaaatttcataaagacaatcccctctctgaatttgttttcgggcataaagcactttctcataaaaggctgtagctactttatggtcttcatttacattataatacattgctgcatcagtcgctaggtcttccacatctgaaagcatagcttttgattctaagtaatctaagattttaaaaagtcgttctttgtcattctcaacgaataaacccataagaaaatcaaacattttctctaatacgtcatcgttcaaatcctttgacagcataagaccttgttcacaaacttgttttccatcaactgtgttggacaacttaaagtgcgtttttgccagcattaaaagtatgtcaagcagtcggctagaattgtgaagagaattagtttgataaattgagacgccttctttaaaatactccaatgccttctccatatgtcctgttgtaaatgagcataaaccgagattgtacaaagaagaacctattaaccgtggcatatcaatttcttgtgcttgttttaatgcattcatgaaatgcggtattgctttttctggatactccatgtctaaataattcagaccgatgacgaatgaacattggattactcttattgagtacgtttcgtgtgctttgtaggtttctattgcttgaacgatatgatgcatagacatgtgggtttgcttcatgtgatagtacacttcagcaactttatagtgaaattcagctcgctctatttcatcggggacaatagatatcttcttttcagctcggttgtaaaaacttattgctttaagatattcgtactgttcaaattcatacatcccatgaaaaaagttaaaataatattcaagaattccttttagatcgctttgtttactttcgatctcttctgataagtctgaaatttcaggtcgttcttcattcatggtttttggttcaagataatcaagcattaattgatgtcgaaaacacatgagcgaatagtacaacaataaatcttgatcttcttccataagctctatttcttgcttcacttcttccttcaagatttctgcatctgcaacactgaataaccttatgtatttgtaccattcattgatttttaagccaacttttgaagaagagatcaattgctccaaaaaaatcaccctcctagtatttcgtctgattatgtaatattttatcataatgtaatatgctgggaagggtgttttttcttaatttctcaattcggtgtgacatgcgatagaacccctcctcgttagagaaggatacgtgttcagtttgctgttgcttttagtaaggcaagccattcatctaatgttcctgagaaaccttgttgaacggctaattcatatgctgattttccatctttaccggcagcaccagtagctcctttagctccagtactgcctttttcaccttttaatgaagctaaccattcaaaagtgatgaatattcaaggcggaagtaagggaaattaacaaaaaaatgtgagggaatgtagatgaaacgatttatcttggttatacctttattggctgctgttattgcctctccaactcaaatgaaagcaagtccaatgccttgtagtgcagtactcgaaccggtaaatcaaaaactgaaaaatgcgaagggtgcggcactaatctataaagtgcagttatacccgccaagtgctgcaagaacgaatatgagtattcttgctgtccaccttcctcagccatcttcttatggaagctacgacggttatgaaggtttgccgccaaaacaggggaaatcagttggcgatttaaactatatccgactcccgagggagagagtcctaattgggctggaaggattgattccatatcagctgaaatgacaaatgttaaagtgcaagtgcgcctttcaaattctaagacacaaaagttgggaccgagtgtattaacaaacaatattcaatcttgctattagaaatgtagagctcttatcaaagagagcaatgcgactggatcttttgtaaattgtcaaaaaggtaattgatcgagaaattctggtgaaaaatgaagaagagtccattaagatggaatgtctggagtcaattcatcatttgacagaagagagccggtaaaagtcgatattgcgtttgattttgtacatagaaagacggcataaaaagaaatggttagctaaaaaggcaaagagtcaacgctctttaccatcaggtgttttccttaagcggtctgcaatatgcttaattaaattcagcgcagcagtcactaatccaataactaaaacaatttcaagtaagaggataaatccaaaatttaaaccgcgactttcaaagtaatcatcggtaaaaaagagcaattgataaattccaagcattagcacaataaaggaagcgcctataatcgccagagactttttagagaactccttagtatggttgaaattataaaccaataagaacaaaaatagacaagccatagcgatcttatgagtcaatgaatcacttgctgagaaaccttgcacaagtaaggagataattaatccggtcattccgattattttgttcaatatatcacctgctttgtataagtatgaccttagatgtcagcttaccaattaaaggtgatattctcaacataatgcagttaaaacttaacttaaaatcgtaattttaagaacaaatttagagtggatcatgacatgctgtttattatgctgtaaacaaacgcaacaataaataatggataagagataacagcaattagttttgaagatttgctctttttttcaaatgtgtatattagtgcaaatcctaaaaagaatattgtgacaaaccaagaagaataggatgggtacaatgcaataagtaagacaataagagtggataacgcaaaagaagagtcaagtgttattttctgatcgtttttcaaataaaccgcctccttacacatattccgccatataaaaacacttaaacattatattaagtcagcatgattaaatgataaacattttaagtcaagaacaagataaagcaatccggcatttcaaggacaagctgaacatgtctgaaaaactgtacatatccttagttaatgtaaactgcttatagataagcaaaatgattaagcggaaaggctgtatagacttatagaaccttatataaacattagatcgcttaaagaaggcgatgtggttgatcagccattgaatatttcatgatgcaattatgcggttctatagtggtgaagacctcgccgtgttccatttgtctagggggaatttgtttaaattcataaacatgaggcgttttagtctgtcatttcctaaaatagtgttttattcttgttacaaatatgcaagaagggcggtttgaacgtgtatagagtgtttataatgctattaattttgttatgtataacattagggtgtcaaaaccaacatagcaaacattttatggaggctgagcaaactatggtcggctatgtcattttaaaaagagagaatcaagcaattctcatacctaatgaaaaagctgatgttaaagactatgaaaatcttagtgaaaaagagattattgaaaagtatagatcggatatagttttactgggacttagtcaacttaacaataaagatgacttgagcaaaggacaaaaaattcgtatttggtataaaaaattaaatgaatcttcacctccaaaaacaaatatatcaaaatttaaaattattcagtaagtggtattgtttcctaggaataccgctgcaaaactgaagcggcattttaaacagaaataatgtcttcaaacctcatctcattcttcattcgcggtggcttattcctgccccgagatttatttgacgattgttgactcaggtgcagagaaggcatatgtcaagaacacattttgaattactgggcaccttgaataaagccagcattcccatatttatatgcgaagagatcggtactgaacgctggataaagaaaaaagtaaccatacatttgaacaagcttgcgaggctttgataaagaaagaacagtcaagagacgaaccattacatacatataatactcctgtgaaagcgggggtgtagttttggaaccttaccaacgttatgaggaattgaagaagaaaacaataaaggttgtccataaagataattacagtatccgctatatagatcaggatgaagcgagtaatgacttagatgaattttataaacaatttgctcagcatttattggaggctgctttggaaaggagtgcagagtaagcttctttttttgatttatttgtggtaagtatcttaataaacggctttatcggtactgatgttaatcacatgcgttacttcttgcagcaaagcggcttctgcgacattttgtccgccgataaggttggtttgaatggcttcaaagggattatcctcacatgtcggaacctgcttcagcgcagctgtgtgaaagacaatatcaacacctttcatcacttggttgactcttctgtagtcacgaacatcgccgagcacaaacgacagtctttgttcatccgcgtatttttgtttcatcacatattgtttgctgtcatctttgctgaacacaatgacttttttaggggttaagagcaaaaggcgttttactatttggcttccgattgatcctgttccgcctgtgacgagaacagttttatcgtgaaaaaacggttgtagctctactgcttgctgtttaggcatggcttatcctccaactctcgtttctctaccatgcatcatatgttgaacaatttcagcgagttaatgaaagaaaccaataaatcaaaaattagagaaaaacattaatctgatgcgctttcatatcgctttacccgattaatagaatagaacttacaaataaaacaatgtactaaatattcataaagaatatttgctcacgtcaattttttctcttcataaattctcacattttgacaatcttcacaaaaacttaacactgaacttcctgtatgtattttacaattagagtgcacgttcataaaaggaggatggaaaatgaatcattcaaaaacacttttgttaaccgcggcagccggattgatgctcacatgcggtgcggtttcttcccaggccaagcataagctgtctgatccttatcattttacagtgaatgcgacggcggaaacagagccggttgatacagccggtgatgcagctgatgatcctgcgatttggctggactccaagaatcctcagaacagcaaattgatcacaaccaataaaaaatcaggcttagtcgtgtacagcctagagggaaagatgcttcattcctatcataccgggaaactgaacaatgttgatatccgctatgattttccgttgaacggaaaaaaagtcgatattgcggcggcatccaatcggtctgaaggaaagaataccattgagatttacgccattgacgggaaaaacggcacattacaaagcattacggacccagaccgcccgattgcgtcagcaattgatgaagtatacggtttcagcttgtaccacagtcaaaaaacaggaaaatattacgcgatggtgacaggaaaagaaggcgaatttgaacaatacgaattaaatgcggataaaaatggatacatatccggcaaaaaggtaagggcgtttaaaatgaattctcagacagaagggatggcagcagacgatgaatacggcagtctttatatcgcagaagaagatgaggccatctggaagttcagcgctgagccggacggcggcagtaacggaacggtgatcgatcgtgccgacggcaggcatttaacccctgatattgaaggactgacgatttactacgctgctgacgggaaaggttatctgcttgcatcaagccagggtaacagcagctacgcgatttatgaaagacagggacagaacaaatatgttgcggactttcagataacagacgggcctgaaacagacggcacaagcgatacagacggaattgacgttctgggtttcgggctggggcctgaatatccgttcggcctttttgtcgcacaggacggagaaaatatagatcacggccaaaaggccaatcaaaattttaaaatggtgccatgggaaagaatcgctgataaaatcagctttcgcccgcaggtcaataaacaggttgacccgagaaaactgactgacagaagcggaaaataaacataaaaaaagcagcttatccaagctgctttttgatgtgaagagcgtttcatgagaaagtcttggaacggatagccgaaagcacagccggcagccggtcatacgtgtacgccggtactgtctcttggtaattaagcgccgcgatttgtttacgttcacccgggtttgtcatataaaattggatcttatccgcaaaatctgcaaacccgctgtaagaaacaaatgatgaaaacgggggcgcgggagaaaggtctgtcagctgaaaggcctgacaagccgcaatgtctaagcttcttgtatttaaactgatattttcgatgccgcgtccgttctgattgagcgcaaaccgataagaacggtgagggtttaagaccacgtctgcgctgttgtaatataatgcggcacgttcgggtgcaatccattcatccattacgagcacattttgctgcctggcgatttttttaggcagatgtctgcgccatcccttcccgataatacgaagcgtatacggaagctttgccgctgctttcaccagttcaacgcggttcggatacgggtatccgatcagaagcagatttgtgtgaagagaggcttcagcaggttgtttcttaaaaagccgctgattaacggggatcggtacataatatacgtgctgtaagcccatttgccgataagcatcaagcgcgttttgttctatcgtcaaaacggcatcggcgaaaggggcgattgtcatgctcacatcgaaataaaaaggatcctccgtcatccatagataaacgggaatctgttctgtcttcagccattgaagccattcagacggaatacggtctcccgtcatcatcagactgatgtctggtttgaatgcccgtatactgcggatggtatcttcctcaaactcagaaacagaaaaaaagcggacggaagactgtaaaaagccttcctcgatccagcggtcaaaatacgtgtatatgcctttatatcctgaacggatatataaaacgttcatatgctgttacgaagtgaacgtgacactttcaactttgtcgacgtcaagcaatgttgtagcagagcctgccggtgtaacggaattttcctgcgtaacaaaaacgattccgtgaatttcgtcaaaggcaacaaattgaaccgggccgatcatgtctcctgaatccatcacaatgctgatgacagtgccgggctggattcttgcaaaaatccatctcgccgctaatgaaataccgcttcccaatacagattgtgcgctgagactgtctttcgccgctgcttcatctacttttgcatcaattgccgattccaataattcttttacgctgtttttcacgttatctcctccatctgtgccgccagataaagcgctgttgtcaaatacaggggctaaaagagttttcaataagttctttttaagctccaaacgatcctcgctcatgcggacatacacctcctttaacaatttcaacctcacgtttattcatattcctgattgaagagattggtataagtcgaatgccgttttgcttgtgtttttttcaatatttaatcaaacagctgaattttcgaatcaggctttgtttgcctatgcggattgtaagagtatgacatacgttgtatagattaaaaaatgaaggagaggaatactttggattcagaagaaactgtaaaacacgggggttttgaggaggaatttcagctcgtactgcttcttcttcttttgttatcccgtcagccgtccggagatcattcagatttgcggcgtcagcttgtaatggcaaaagagcttggaattcctgtatcacgcgtcaatctgattaacggcagcacactgcaaaacgtaattgtcaaagaagtgctgtcagatttggccgtttttcaaaatccgctcaataatacgagatcaaacgtcgcgatttcaagcatcgtcagctggggtgctttttaataacggatatcaggctctgtctctttcggagccgttttttacgttttacagaaggggtgacgggatggaaaagaagatctcaattatcttaacgagttacaacaaaccggatcttgtgaaacaggcgattgaaagtgttttgcatcagacctacagcaattgggagctgtttgtgatggatgatcattcaaatgaagaaacctcggctgccatcagtacgtatataaaagatcctcgcatatattatgacaacagttttatcaatcctgccgaacggctgaagtcgacccggtatgccgttttgattaatgatgcgctttcacgggctaaaggcgaatacatcacttatttgacagacgacaccgtatttcatccggataggctcagccgcatggcggaagcgcttaatcaatgcagcgggtttgatgccgtctattccagccagaaggtgatacatgtaaacgggcgcggaacagaacaatttcacttctatcgttttgctgaagaggtgcttgatcaggccgcttttctcgttgatcactgttcagtgatgcaccggagatcattgcttgagcgtgtgaaagagaagttcggcagcttttgggatgaagatgttatacattggaatcacggagactctgttttttggagcaggctcaacacatttacatcatttctgccgataaaagaagtgttggatacgacctataaaacacctcactcatttcagaacacgtatcaatcgcttccgtctgtcctgatcgatgggtcttttgtaaaagggacggaccagaaagtatatcagcttgaccgaaataaaaggaagcctgtaaacgagcgctggcatacgttatatgaagggcgaactgtcgtcattccggatccgtttttatttcaatatgaggaagagaactccgtcagtattccgaattttcagctcgtcagggatcagtttcatgtttattttatagaagacggggagaaaaggctggttgatcatagcgcatttcgcttttaccgatttaaacggcatgacatcccggctttagaacggggcgaaatacaagcgcttccggacggtccgccgatcagcagggggacatcgggctgtattcaacatctgcccgggagaatgctgtttcgcattgaacgggaattttatgtttatttgagaggggttctccatccgatcagtcatgacgtagcgaaacgcttttttgcgaatcagaaggcgatacccatttcctttcagcaaattaaacaattaccaattggaatgccgttctatccggtgtacgatgaaattatgagaaatctcaatataacaaaaggttgagagatgcagttggatgtgtaaggaaaaggagagcttttatgaccgatcaatttgataaaaccgagaagcagtatatagagcttacttccggcattcagaggttcgagcatttcagtgtatatacggacccttttttgccgcagattttttcacataactttgttcagctgcaccgtacatttcagttagacaaactgctgccgtttttttcgtccgttccgggcatgcttcaagccaattatattcatgtgaaagcggctccggagcacacgtttccgcttcttctgaaacaaactctggtaaaacagggctgcgtagtggaagatgagctgttttttgcaaggaaactggaaaatggggacctgcaggccgggcacccgctcactgcttgggggacggaaaaaagcctcgccgacgggtcgtctattatgaacatctatgatgccctttacattggcgaggcggcggccgaacaaaagcttgagcggaaatatcctttgtataaggacggaacggttatgcttgtcgtgtgctacagcgatgcctcacaaacgattccgatcggctgcggagagcttttcatcaacaaagcagataaaaccgcaaaaatagaagaagtcgcaattctggatcaattccaacgaaaaggctacggatcgatattgatgaatgagctgatggcggcggcaaagctgaacggcatggaaaccgtataccttgtgacgtccgggatggacggtgtaaaccgcttttatgaaaaactcggcttcaaaagatttcggcgcgtgcatacaatttttcattattttcttacatagttgggcattcgcataaaccaattgggagttggcccgcatacaatgccgtatatcgtaagaagaaaggatgatttgcgtatgtacggatatggctacggttgcggcagttttggctatggttacgggcacggcggctgcggaggcggaaccagcacttttgtgctgatcgtggtattgtttattttattaatcatcgtcggtgcggcttttatttgttagactgaaaaaaatcctataatgaaaatcagcctgcagagaacatcactttctgcaggctttttgttatttccatgctgaaaaatcagcttgaaaaacattttaatacatattacctttctggagaagggggcgaaaatgtgaacataacgattgaagaattacctgaatcaagaattgcttatttccgaaacatcggagagtatggcggaaagcaaaacaaagaactgatggagtcatttaaaaactgggcgcaattgaatggtctgcttgatcattctgtcattttaggaattccgcaagaccatccgaatcgtactcctaaagagaaatgccgctatgatgtttgtcttgttatcaatcaagaccatgtgcctgaaccagcccggatcggtacattttccggagggaagtacgctgtcttcttgcttgaccacacaaaagaggcagtcagtggattttggaatactgttttttctgagatcgaaaaaaataatttatcaatcagagaacagcccattatcgaaaggtatactttacaaaaggtgaatcatcatttgtgtgaaataatgattcccatacagtaaagaagacgggaattttccgccttctgcttatactgattcagatcaaaaatgatgtgatgatgagctgagcaaagaataaaatcaacaataggaatagaatttccagaacgctcttcaggctgtcggaacatcaccggcagcctgttttacagaaaggtattttctgcaaaaaactttctgaaggataagaatgcggttattcatctgttcatacaatgaagcaaatgggttttcgaggtggaaagatatggggagctatttaatcaaaccggagcttgacgcaaattatccgtcagtcagtcatggaaagggatcatatgtgtatgatcaggaggggaacaagtatcttgacggagcatcgggggcggtcacttgcaatatcggccacggcacggaggatattatacaagctttaaaagagcagcttgactccgtttcgtttgtgtaccgctcgcaattcaccagtactccggcagaagaactggctttatttctggccgatcatctgccgggcgggctgaattggtcattttttgtaaacagcggctcagaggcagtcgaaacagcgatgaaaatggccgttcaatattggcaggaaaaagggcaataccaaaaatccgtcttcctatcaagatggggcagttaccacggcattactttgggagcgctttcattatcggggttctacgaacggagatatcgcttcacccagctgctcgaacggtttccggccgtttcagcacctaatatgtatcgttctgagctgcagggagaggaatttgtgaaagctgcggcggctgaactggaaacggctgttcaacggatcggttcctcatttatcgcgggatttgtcgcagaaccgattgtcggagcagccggggcagccatcactccgccggcaggttattatgaagcgcttgaggaggtctgccgccggcacggtattttgtttatcgcggatgaagtcatgacggggctcgggagaacagggcggatgcttgcttctgagcattgggggatcgcacctgatatcgcggtgctcggaaaagggttaggcgccggttacgctccgatagcggcagccgttgcgtctgatgacatcattgaaacgatcaagcggggctccggggtcattatgagcggacatacgtacagtgccaacccatactgtgcaagagcggcgcttgaagtgcttcgctatgttaagaaacacgagctgctccggcagtcagaggaaaaaggcgtaatgctgaagcggaaattagaagaaatcaaagagcgcagcggggtgatcggggatgtccgcggtaaaggtctcctgatcggagttgaattcgttaaggataaaacgacgaaggacgttttttcgaaaaaacaggccttcaccgaaaaaatcattaaagcggcaaaaaaacggggcctgcttatctaccctgcaaagcccggcattgacagcggagaaggagacgccgtcatcatcgccccgccgttcacgatttcatatgccgagctggatgagctgtcagatctattttcccaggccgcagaagaagttgaaaaaatgatgaagaaggattgagctgatatgtctatttttcataaaaaaatcgatattcatgaagcaattgccgatgtcaaggacgaatctgtcattatgttcggcggttttgggggagtgggttcacctccgtcattaatcgaagcgattttggagagcggcgttaaagagctgaccgtcatctgcaatgatgccggatttccggaaatcggcatcgggccgcttatcgttcataagcgggtaaaaaggctgatcgcttcccatatcggctcaaatcctgtcgcgggcagacaaatgactgacggagcgcttgaggtggaattttcgccgcaagggacgcttgctgaacggattcgcgcaggcggagcggggctaggcggtattttaactgatatcggcattgataacgcaaccgtttgtgaaaacaaagaaaccgtaacgattgacggaaagtcctatttagttgaaaaagcgctgacggctgatttcgcttttgtgtccgcacatactgctgatgaattcgggaatctgacgtttgacaaaacggcgcgcaacatgaaccctctgatggctgcggcggccgaaagaacatttgctgaggcggcagagattgtgcctgccggcgaacttgacagcgagcatattgtaacgccgggcgttttcgtggagggtgtcgtgcaaagtgaaggagtgaagtggagatgggcttgggaatagcggaaagagagagtatcgcgaggcgggccgccagtgaaattacctcaggtatgattgtcaacctggggatcggcattccttctttagtgccgaactttctgccggccggcatggaggtaatgctgcaggcggaaaacggcgtccttgggatcggcggcagtccggagcgcggagaggaggatgagcttttatgcaatgcggccgggtttcctgtcagtacagttaagggtgcttcctattttgattcagctctgtcttttgccatgatcagaaaagggctgatagatattaccattttaggcgcgctccaagtcagcaggacaggtgatctcgccaattggctcgtgccggggaaaaaagtgcccggaatgggcggggcgatggagcttgcccaaggcgcgaaaaaagtggttgtcgtcatgagccacaccgatcagaaaggccggccgaagctggtcgaaagctgttcattgccgcttacagcagcgggctgtgcagatctcatcattacagagaaagccgtcatcagcatagatgatggggcttttgttcttgaggaactgctgaatggcacgaccatagacgatgtcattcaaacaacggatgccgaaatcagattgggagaatgttttcttaaaagggggtctgtccatggatcaattagaaaagaaagtcactgagtgggcggaagaaaacacagcaaaagcggtaagcctgctgaaacggctgatcggggaaaaaagcacgttcggccatgaatttaacgcacaggcagtcgttttagaaaaactgagacagttcgacatggatattgatgtgtgggagccgagtgtcaaacatttgaaagagcatgcttattttgtatcggaacgcgaagacttccatgaaagcccgaatatcacagccgtaaagaaaggggccgggggcggaagatcactgatactgaacggacatattgatgttgtcccggaaggaaatcccgccgcatggacgtatgaaccgtttaacgctgttgaaaaggacggcaaagtttacggccgcggttcaacggatatgaaaggcggcaatacagccctcttgtttgcgttagaagcgcttgaagcctgcgggattacgttaaaaggagatgttctgtttcaaagtgtcgtagatgaagagtgcggcggcgcgggaacactggcggctgttatgaggggctacaaggctgacggggcgcttattcccgaaccgactaatttaaagctgtttgttaagcagcaagggtctatgtggttccgcattacggtaaggggattgtccgcacacggcggcacccgctatgaaggggtgagcgccattgaaaaaagcctgcatgtcatcacagcccttaaagagcttgaacacgtccgcaacgcccgtatcacagacccgctttatcgggacgttccgattccggttcccattaatattggcatcgtccaagggggaacgtggccatcatcggtagctgaccgtgtggtgatagaaggcaggtgcggaatagcgccggatgaaacgcccgaagcagtaaaagaagagctcgcaagctggctgaaagatttggagtatcgggatgaatggtttaaacaccaccccgcggaaatagaatggtttggggctcagtggcttccgaatgatctcccggatgagcatccgctgatttccgctctggaatcttcttttgagaaaatgaaaggggcaaaaccggttcgtgaagcgtccccgtggggaacggacggagggcttttgcagcacgcgggacagacgccggtcatcgtcttcggtcctggagaagtcaaggcggcgcatcaggcgaatgaatacattgaaatccgggcgttaatcgatgccgtcaaaatcatttctctttttatcatggaatggtgcggggtggcagatgggggtgacggagctgataaaggaactgagggctgaaaagggagcggccgagattgatgcagaccgtttcaatgagcggctcagagtcattcgttatgacggacagatcacggcgcttattccggccgttttggcagaagcaaagcaaaaaggagctcaaaaggtaattttctttgccaagcgcggcgatgagccggaatttgtcaagcatctttttattgttgagggtgtcatagacgggtattacaacggggatgaggctgttgtgatggtgcgatatttagcagaggaacggagacggtcagattcatatgtatcagaagattcgactgttgaccgtttatatgagacaccgcggcggggactgactcagacagaaagcacgctgatgttcagaaaagcggacgaagatgatgcagaccgtttaacgcacttatataaacatgtttttcttacctatccgactcctgtctttaatcccctttatattaaaaaaacaatgagagaaaacaccgtctattatgccgcattcgatcaggatcgtctcattggggcggcaagcgcagatatcaatccggtattggggcacgctgaaatgaccgattgcgcggttctgtcagattacagggggaactccgtaacggcacacttgtttaaagcgttggagcaggaactcgctggccggggaatcatccatcttttttccttagcccgtgcagcgtcttacgggatgaatgccgttttgtaccatgcgggatacggctacagaggcaggcttgtgaacaactgccgcatttcagaagggctcgaaaatatgaatatatggtgtaagactttacgtttggccattcataaggaggaattcgtttgacaaacaaatggtttcagccgaagcgtcattggaaggagattgaattgtggaaagatgtgccggaagacaagtggaatgattggctgtggcagctcacccatactgtaagaaccgtcgatgacctgaaaaaagtcattcatttgaccgaagaggaagaagaaggcgtcaggatgtctgtaaaaaccattcccctgaacattacgccttattatgcttctttaatggatcccgataacccgagatgtccgatccgcatgcagtccgtgccgctgtcagaagaaatgcacaaaacgaaatatgaccttgaagatccgctgtttgaagatgaagattcaccggttcccggtcttacgcaccgctatcccgaccgcgttctttttctggtgacaaatcaatgctcgatgtattgccgatattgcaccagaaggcgtttttccggacagatcggaatgggggtgccgaaaaaacagcttgatgcggccatcgcttacatccgggaaacgccggaaatccgtgactgcctgatttccggcggagacgggcttttaattaacgatcagattctggaatatattttgaaaaacctgcgtgacattccccaccttgaaattatccggatcggaacgagagcgcccgtcgtatttccgcagcggataacggataatctttgtgagattttgaaaaaatatcatccggtctggctgaacactcattttaatacgagcatcgaactgacggaagaatcggtagcggcgtgtgaaaagctcgttaacgcaggtgttccggtcggtaaccaagccgttattttagcaggcattaacgattcggtgccgattatgaaaaaactcatgcatgatttagtgaaaatccgcgtgcgtccgtattatatttatcaatgtgatttgtcagagggaatcggccatttcagagcgcctgtgtcaaaagggctggaaatcattgaaggactgaggggccacacaacgggctttgccgtgccgacctttgtcgtcgacgccccgggcggaggcggtaaaatcgccctgcagccgaactacttgctctcccaaagtccggagaaagttgtgatcagaaacttcgaaggggtgattacatcttatcccgagccggaaaactatatcccgaatcaagccgacgactattttgaatctgtttttccgggaacgatggccaaacacgagccggtcggactgagcgccattttcgcggacaaagaggtttcgttcacaccggaaaatgtatcgaggatcgacaggaggaaaacgtttacatcaaaccctgatcatgaaacgctgaaagaccgcagggaaaagagagatgaattgaaagaaaagaaatttattgcacagcaaaagaaagagcaaaaagcaggatcggaagtcggaggtgagtcgccgtgaagccatgcgagtggtgcggcaatcagaaggcgtcagctagtcaggcggctgtgtactgggagcttcctgacggtacgagggccatagaaattacagaaacacccgcattcgcctgttcctcctgcggcatgacttatcaggaggaagcggtcatagcggaaatcgaaaatcagctttttttagtcgatgcaaaaaaattaccggaaacactcacatatcaagagctgatggagacagaacggatcttgaaacgaaattattttgacttctcctagtcttcttttgttgtaatttcacacttgaattgtataatagtacaacaaaagacagtcatcaggaggggaaacccatgaaatccttttatcactatttgatgaaatacaggcatcccaagccgcaggacgcaatcagccagtttgcgaatcaggcatacgaagatcacggctttccgaaaacgtcaagcgattatcacgagctcagttcttatttagaactgagcgccgactatttagaaacgatggcgacatttgatgaagcttgggaaaaatatgagaccgaggtgcatcacgcctgacgaaaaaccgcacattgtgcggtttttttctgttgaaatcactcgcttatgaggtgccgtatgagcaaattccgcaacgcgtccgttttgatcagcacgtaaacaaatcttcctgacggcacgtatcataaggcagtagaatgtatagctgcagagttcaccggatcaggcctgctgccggcggggccccgtgtaaggatcctctttttcacggagaaataatcaaacttttaaatgaagtgaggggaatcaaatgatccattaggtaagactgatgaggcactgacgtttggacgggaaaggggattttatgtgacaaggttgaagcggattgaagttgtggcttcattgaaagccgaagcaaatcttgaacattacggcggtgatattgtcaacatgccttcgggccgggtattttcctttgcgtcatagagaaaaaacaaaaactcataaaaaatagaagctttttgtttcagcattgttactgctcagtcgatcgagagcggaatgtcatcggacgcttctgttacggtaagtgaaaaaacgcacaagcatattgcggtttttgacattttgaacaggtgcagaaatagatatttcctgtggttttcatgcccatgcgaaattatggcggccggcatacgatagcgtatgacagtccgcggcaagggggagacagcatgaagccagataaaccgaaatttcaagtgggagacatcgtggtcgtcgtgatgtacggaaccgtcggcaccattacgaaggttcatcaaattgataaacattatctttacgaagtcaatcataatgaagtgctttattttgaatcgtccatccagctttataaagattatgagggcgtgatcgtcgatatggagaaattggatattgaatatgaatttctgatcggcgacgtcgtatatgtaaaggactacggaaaggaattattccgtgtcatcggtcacagaactgaaatatggagatatttagaggatggctgggaggatattatttatgagctgactcggctgaaagacggagagtggcttgaaacggaggaagaggatctcacgctggttctgagaaaatatgaaatggatcagtttgtgcatcagctgctgtttgtccactatgttggggaagcatctcatgagatcggcgaggataccgtcgcgtctgctcttcttcagtttgaaggcgatgctgatgatcccgatgccctgcatgtgctggcggtatcgattgtagatgagctgcttgatatttataacgattataagattctttatcatttgttcggtgacgaagaatataaagatatgatgaattttgtgctggaaagcctgcgggagcatttcagctagccggcaaaaaaacggacggtgacatataaaaaccagggcagacagccggcaaagattacaaacgacattcctttcagcactttttccaatacgatatcaaatccatctccgtccaataaagccatcattttcgtcatcatcttttctccctccggggcttgttttttaaaagtatatgagcggacaaaacgtttagaactttcgggtataatttgaacggttttttcataaaacataaaaaaggaggcggtgtttgcatgaaagaaatagatcttgtgattgacacagaagaaatagctgattatttttacagtcagcttgctatgcgcgggtacataccgagtgaagaggaaatcttcgaaatagccgacatcacctttgattatttattagaaaaatgtatgatagacgaagagcttgatgaagactgaaactgcggaaccgaagtgaaaaagcttcggttttttcaatcagctcgggagaatgaaacatggggggaaaacgttgtacaagccagcaagtcttttcgcattgtttattctgctcgcagcagcgatccggatagaagccgtccgggtttttgatgagcgtgtgatagaagcggctgtcaggatcagggctgcctggctgaatgaattgatgttatggataacggagctcggcacgaccgcggtgcttttgccgcttcttcttttgacaggcgcggctctgtatatgtacaaaaaaacgccggatgttgtttttttgccgcttctctttctcattgaacggattgcaaacataaaaataaaagaattgattgaaagagccagacccgcttttgaaccgctcgtccatgaaacctcatacagttttccgagcggccactccatgaattcggcagtggtgtatcccgtcatcgcttactttttgatcaagcatgttccgtttttcacgaaaagaaagcggaccgtcaccgtctttaccggagttctcgtcattctgatcggattcagcagaatttatttgggcgcgcattttccgacggatgtccttgccggattcagtcccggactttgcctcgtttcgctttttgcgctctttgacgaaaagtatcatctgtttcgacaaaaatagagacaggagaaatgagaaaaaacgctaatactattaagaaataagagggagggatcttgatgctgttatcgctgcccgtgtttaaaaaaaagacttgtgcctatgatgtgacgatttttcaaacaccccgctacggcgagaaaaagggatacagggtcgtctatcggacagagctggccgctgacaatcatcaagacgcactggaaagggcattttctgtttttaatgtgcctgatacggtcccaaacgactatcaagccagattcatagcgaccggagatgtcatactcatagacgaaggaagaaaagggaagacctattacaggcttaaccctgcgggatggagcaaaattaaccggctgctcgtccagccgaggtaagacggggccggctgaatcttcagccggcttccgtattgtctgggaaagacagtgttaaggcttccgtttagcggcggaatgctcttttccatgcgcttcatcagctgcaatgacgtctgaaacgggcacgtgattgttctttttctggccggtcacccggttgcgctgttttttgcccattatgttcactcctttttctttaggcttgtcatcccgcatattctgcccaagatcgccctgatcatgctgatgattgtctcttaccgttattcagtgtacaatgggtgggagtttgaataggcaggaggaaaaggaaatgagtgtacatataaacgcagaaaaaggccaaattgcggatacagtgcttttgccgggagacccgctccgagcgaaatttattgcggaaacttatcttgaaaatgtggaatgctataatgaagtcagaggaatgtacggatttacgggtacatataacggcaaaaaagtatcagtccaaggcacaggcatgggtgttccgtctatctctatttatgtgaatgaactgattcaaagctatgatgttcaaaacttaatcagagtcggctcatgcggagccatccgtaatgacgtgaaggtgcgtgacgtgattttggctatgacgtcttcaacggattcacagatgaaccgtgtcgccttcggcagtgtagattatgctccttgcgcagacttcgaactgcttcataaagcgtaccaggaagcgcaaaaaaacaatcttcctgtagcggtcggaagcgtattcaccgccgatcagttttacaatgaagactcccaaatcgaaaagcttgccagatacggcgttctcggcgtagagatggaaacgactgctttatatacgcttgccgctaaatacggcaaaaaagcgctgtctatcctgactgtaagcgatcacgtgttaacgggagaagaaacaacggcagaagagcgtcaaacgacttttcatgatatgattaaactggcgttgcatactgtatcgtaaacttgagatgagggttatgctgattaaagcagccctcttctttatgcatcgccctgattcaaaaaaagaaaggtaagtgtaaaatgaagaaatccactaaatggttttcgctcgctgccgctctcagcgtaaccgcaatcgtgggaaccggctgcagcatttcaggcggcgacagccacaaggacacaaaaacagcagctgaaacaaaacaatcagatgacacatcaagcaaaaaaacaacgaaggcagaaaacagcgattttgtattggagagcaaatattttaatgatattaaagaagtgaacgggcttgagaccattcaaaacccgacaaatacacttgcgctcgtgaataagacatacacgctgccgggagattataaaccgaatgatctcgtgatcccgaaagtcgaattttcttttactgagaaaatcgagaaacgatatatccgcaaacctgccgccgatgctttggcggaactattcagcgccgggaaaaaagaaggttatgacctggttgccgtttcaggataccgctcttatgacagacagaaagttattttcgataatgaagtcagtctgaaaggtgaaaaaaaggcgaaagaagccgtcgcatatccagggcaaagcgaacaccagacggggctggccatggacatttccagcaaaagcaacggatatgagctgaatgaagcgttcggaaacacggcagacggcaaatgggtgaaagaccatgcgtatgaatacggctttatcatccgctatcctaaaggcaaagaaaatgtcacaaagtatgagtatgaaccatggcatttacgctatgtaggcaaaaaagcggcaaaagccatccatgaccatcaattaacgcttgaagaatattttaatgaagtaaagaaagtgtaataagaagaagcccgcttgaaaaatagaaagcgggctttctttattaccagaagagtaaacctccaagcgcaaatccggtaatcaaaccaaggccgataccgtaggctgctccccagcctccccagcctccccaatagccgaacccgtatcctctgtgacggccgccgacaggggcgatatacactttgctgttagtcacccgtacgattcttccgacgtggactctgccgtttcgttctgtaattcttgctacttttccctggtgctgccggcaaagatgataatagttttgcatcttttctcctcctatccaacctatctttctatgtcagcttatgatagagtgcggtaaaaaggttggacgaaaacaggaggacaatcgccgttttacttgtaagcgacaaaagcgcagtgtcccatatattcacggtacgtctgcataagctcgtaatgagccgtcagcgtatcgtagtgaaccggctgaataacgggcgataaatccatttctgtagtcggctcctgcgcattgttttcatagagagcgggaatgaaatccgctttctgaaagccttgctgaagcaatctctgtttccatgccgtttcatcctgcaatacggtaaaaccgtagaagtcttttatctgcgtgatggcgttttccggcatgggcttttgtaaagcagcttcaatgccgatcagcatacccccgggtttaaggacccgcaggatttcagacagcgatgaatcaagatttgaaaaggtgagaactgattcggaaagaacggcggaaaattgattttcagcaaacggaagccgctcaagttccgccaaatagcccggaatggttaagccttcagcggcaaatcgttttgctgctttttcaagcataaggggatccttatcaacacaggtgacggggtacagcaggtggccgagataagcggccgtctgtcccgttccgcagccggcgtcaagaatcggttcgccaggaggaggagccgcttttgtgagaacggctttggaaaaagcgagcccgccggggtgagcccctccgactccgaataaggacagcatttctaaatatttgctcaaaggccgaatcctccttttttcctcagcatatgttgagagaaaagcataggtttgggtaaacgggaaagaagggcgcctcacgtttgaagttgacgaatgagcgttcgtctatgataataatgtaagaataaaaaggtggtgttttcttgaagcggcaatttaaactgttttttattatattgatcactgcggtcgcagcctcggcgcttacgctgtttatcacgggcaatacgaccattttcggacaaggctcggctgctttgacgaacagcaaatttgagaaattcaataaagcctacgagcagattaaaagtgattactatcaaaaaacagatgacagcaaattagtagacggagcgataaaaggcatgatcagttccctggatgatccatattcttcttatatggacccgcaggaaggaaagtcttttgaagaaacaatttccgcttcgtttgaaggcatcggcgcacaagtggaagaaaaggacggaagcatcctgatcgtatcgccgattaaagggtcacccgcagaaaaagcgggggttaaaccgaatgaccagatcttgaaggtcaacggcaaaagcgttaaaggccttaatgtaaacgaagccgtcgcattaatccgcggcaaaaagggaacaaacgtcaagcttgtgctgcacagagcgggtgtcggcgatctgaacctatcgatcaaacgtgacaccatcccggttgaaacggtgtactctgaaatgaaaaaaggagacatcggcgaaatccaaatcacatccttctccgaatcgacggcaaaagagctgaattcagccattgacagcctcgaaaaacaaggagcgaaaggatacattctcgatttaaggggcaacccgggcggactgatggatgaagccatcaaaatgagcaacatgtttattgataaagggaaaaatatcatgcaggtcgaatacaaagacggcacgaaagaggtcatgaaagcgacgaaagagcgcaaagtgacaaaaccgacagtcgtcctcgtcaatgacggcaccgcgagcgccgcggaaatcatgtcggctgcgctgcatgaatcatcgggcattccgctgatcggcgaaaaaacgttcggaaaaggaaccgtgcagacggcaaaagattacagcgacggttctaccgttaaactgacaatcgctaaatggctgacagcggacggagagtggattcataaaaaaggcatcaaaccgcaatatcaggttaagcttcctgaatatgcgaacctgccgtatttagatgcgaaaaaaacatacaaatacggggattccggaaccaccgtcaccaatgcgcaaaaaatgctgaaagcgctggggtacagcgtgaaagtaaacggcacgtatgataaagcatttgaacaagccgttaaacaattccaagcaaaagagaaactgaaacaaacaggcattgtaacgggagacacaacggcaaaattgatgacggatctgcaaaaacagcttgcggacaacgatacacaaatgaaaaaagccgttgaaacattaaataagaatatgaaatagtaaaaaacacccgatgcgtcgctcgcgcattgggtgttttctgtttgcgaaaagcccgtcttatgtcgtttcctgttcaaaaaggtggctgttcgcctgaatgaaaaactgtgattgctcatagtgataggtgacttttgagtagtcaaacggctggccgttggttaaatgaaaaatcgtttcaacgcaaagcttaggcgctcctgtaaacagacctaagtactccgcttcttcttcatttaacatccccgcgtacagatataaatctgaaaaaccgcgctttaacccgagaccttctcgaatataatcaaatattgattctgccacgatctctttattcaaatacgtaataatcgatttgttgtaaaatgactcttcgatacacaatgtcagcccgtcaatatatcggattcgcttgacataatacacgtcgccgtcaggcggcatattcagattttgggcagcctcagacgtgggttttctcacttccagcgctaataatttagaagtgacattaaaatcttcaagtgattctttaaatccctgattagaaagcagactgatatacccttttcttttattccgtctgacaaaaatgccgcttcccctcacttgaaacacaatcccctttttttctaataaatctaaggacttggtgatcgtgcttttgctcacgttaaaccgggtcattaaggtttgcagcacaggcagtttatccccttgctgcagctgatgttcttctatgtatttttcaatatctatcgcgatttgctggtattttaacatatacattcctcattcatttattgtcccgcttctttcagaattatagcataatcgtttttaaaagccatttcgtaaattaactataattgtttatgtattgataaattataccggtacaattataatataaacgtataatatgaaagtgaaggcaggatttcttctacacttgcgaagcggatgcttgaagtggctgcagtgcatttattcggcatgcaagcggcagtcaaataaaggaggatataaacgatggggacattgccaaaagattttttatggggaggcgctctcgccgcccaccaatttgaagggggatggaataaaggcggcaaggggccgagtgtagtggacgtcatgacggcaggggcgcatggtgtgccccggaaaataacagatacaattgaagagcgggaattttatccgaatcatgaagcgatcgatttttatcatcgttataaagaagacatcgcgttattcagcgagctgggcctgaaatgtttaagaacgtccatcggctggagcagaatttttcctaaaggtgatgaagccgagcccaatgaggaaggattggctttttacgaccgggtgtttgatgaattgctgaaacatgggattgaaccggtaatcacgctgtcacattttgagatgccgctgcatttggcgagggaatacggcggtttcagaaacagaaaaacagtcggattttttgtgaaattcgctgaagtgtgttttgaacgctataaacataaggtgaagtattggatgacgtttaacgaaatcaataataagatggatgtgaataatccgatctttttatggacgaactcaggcgtcgccgtcaaagaaaacgaaaacgcaaaagaagtcatgtatcaggccggccatcacgaactgctggcaagcgcattggctgtttcgaagggaaggaaaatcaatcccgagttcaggatcggcgccatggtatcacatgttccgatttacccgtactcatctcatcccgatgatgtgatgctggctgaagaaacgatgagacagcgttttttcttcccggacgtgcaggttcgcggatattatccaagctatgcgttaaaagaatttgaaagagaaggctatcagatacactttgaagacggtgatgaagagattttgaaaaacggccgagtggactacctcggattcagctattacatgtctacaaccgtaaaaagtgatgtatcaaacgataataccggggatgtcgtaaacggaggattgccaaacggcgtggacaatccttatattacagcgagtgattggggctgggcgattgacccgaccggtttacggtacacattaaaccgcttatacgaccgctatcagattccattatttatcgtggaaaacggattcggcgccatcgacacattagaagaggatggttcaattcatgacacagcaagaattgaatatttatcgtcacatataaaagctttgaaaaaagcaatcacatatgatggtgtggatgtaatgggctatacaccatggggaattattgatatcgtgtcatttacaaccggagaaatgaaaaaacgctacggtatgatttatgttgatcgggataatgaaggcaacggttcaatgaggcggcttaagaaagactcatttgaatggtataaaaaagtgattgaaacaaacggttcatatgtatcctaaaggtgtaaaaagggaaggcttcaccgtcgtgtgaagcctgctttttatcagtaattttgaaagcgcattcatttaagcgggaaggaggtgactgtccggcttttcatttagaatcgcttataaaaataaggaaagggatggtggttcatgttttttaaaaaaggtctgcacatgacgctggtttttcttatgtttttctttttcatatcaagcagcatggaaaccgaagtgtatgcggctgatcagagggcttcagacaaaaacaaagtaagggtgtggttcagttctgaaaaagatccggcttcccgtacgtggtatgacgggccgctggaagtgaaatacgccttagacgaacaaacaccgcttacattgacaaaaaagaaggcttctgactccgccgctgtgtatattgattcgtcgcgccgctatcaaagtgtgttaggcgtaggatcgtccctggaagaatccacaatccataacttatcaaaaatgacacccgcaaaaagaaaagaagtgctgaaaaaactggttgatcccaaagatggtatcggaatggacgttatgcgcataacgatcgggacatctgattttacggcacaggaattttatacgtatgacgatatgcctgaaggccaaacagatcctaagctccgtcatttctcgattcaaaaggatattgatttacacattacagcaaccatcaaggaagcgctggcgataaatccggaactgaaaatcatcgcctcgccgtggagcccgccggcttggatgaaaacgaatgaaaacctcaagcggggaaagctgaaagataaatatatcggcgaactggccgtttacttccgcaaatttattgaggcgtacgaaaagcagggaattccgatttatgccatgacccttcaaaatgaacctttgctggaaatcgactatccgagcatgtttatgccgccgtctcagcagcgcaaactggcactggccttaaaaaaagaaatgaaaaaacacgtaattgacacgaaaatttggatttatgatcacaatgcgagcggggcgtggaactatattccgccgattttagatgataaaaaaggaaaccgggcggcagacggcatcgcttttcacgattatgacggtgacctttccgtcatgtcggaaatcggaaagagatatcctgatcaatctattcacttaacggagcggtctgtctgggggacggcaggggcggaccggatcgcgcagtatttccgcaacggcgcgtcgagctacaatgcgtgggtgacgatgctcgacagtcaaatcaagacgcatcattggataggcaccccagacccgacgctgtttattcaggatgctaaaaaccctgaccgctattggaatatcccgatctttcatatgacaggcaacttttcaaaatttatcgaccggggagcaaagcggatagaaagtaattatggctccaaaaacacagtctcgaatgtatcgttccttaatcctgatcaatccattgtgacagtcgtaatcaaccagacatccgccgatcaaaaattccatgtcgtttcagaaaatcggcagtttgaagctgtcatcccggctaaaactgtggctacctacaaatggaagtgaaaaaagtaaaaaaccggcacatttacgtgccggcttctttctgttaagcgcctttttggttcagttgatcagaaggcgcttgattgaataaaccgtctttgacggcgtttgaagccgctttttttacaaaaaacgggttaaggataataacggctgccatgttagcggtcaaaccccaaaagccttcatatataccgtgggcggattgggtgatatttaccgtgaatgtcacgataagaccgacgagaagaccgataattgtcgcttctttcgtttgattcttccaaaacagactgacggcgatagccggaaagatctgaaccatgccggaaacaccgagaagctgaagggtaacgagcgcagtcgggaacagcatgccgaataaaagcgcgagcccgatgacgacaaataccattgaacgggtgatcatcgtcagcttgcttggtgacacattcgggtgaatcaaatcccgatataagttattcgcaaataagtttgatgctccgatggccatgatagagcagggaatcaatgacgcaagggcaatcgtggagtaagcaaagccctgcgcgactccgccgtaagacgtttgaatcagcttcaataaagcgagccgcggattggtatcttccggcaggacaagaaacgcgataaagccgagaaaaataacaagaatcaaaacaatattataaagcggcagaaacatgctgtttttgcggacggcatctgcgctttttgccgtaaatacgccggttgccgcatgcgcccacataaagagcgccagcgcagatacgatcgaagctgtgataaaccaaggaattcctttcggccccgaatccgggatcgtcagcatttgcggcgctttttcagccagagtgtgaatcatcggcgtccagccgtgaaaatggatcagcgggagtgagacgaccataaacagcataatcacccacaccagaatgtctttaataatcgccgtaaaggtcggccctttaattccgctgaaaaaagtatacagcgctacaagaataaaagagatgatgacgaccatattgacattaatgacacccgttccggccacctgaagcgtatcttgaattccgctcagctggagacaaatataaggaatgagcataagaacgccgacaatggcgacaagactggccaaaagtttactgtcaaaacgctcacgggcataatcggcaagcgtcgttaatttgtgtatttttgccactttccacagcttcggcagaaagaaataagcgataaaatacgccaaaacagaatacgggattgcaaaaaaagcaacgcttccccctgtgtaggctgtgcttgttaagcctaaaaacgtataagccgtataaagatccgcgccgactaaaaaccagacgaggagccccccgaaccgtctgccgccgacagaccattcctcaacagaagtgcgtgatgatttgtctctcccggctataaagccgatgcagacaacggttaaaacgatgatggctgtaatgatcaatgctgttatatttgcgggcatcagtccagtcctccttgtttcttctgcagcctataaataagaaacgaacataatggagtgactgcgatccataaaagcagccagaaatgaaaaaaaggcagcccgataatgatgggatgaacccgattagcgactgacagcagggccagctggctgaaagggattaagatgagaacgaaaattagtgcttttctgaccatttactttcctcctgaaacttgataatgctccttatcatagcaggtgtcagataagatcacaagatatttttcagaaaaaaaagaattctattacttttttaactgaaacactttagttgcatcttcattcatattaaattagaatagttaatatctcgaaatcaagatatttaggagtgaatacgttggatacacaaggattgcaccatgttaccgcatttgcaaaagatcctgctgaaaatctacggttttatactgaagtgctgggtttgcggctcgttaaaaaaaccgttaattttgacgacccggccacttatcacttttatttcggcaaccaaaacggagagccgggcacgattattacattttttccttttcagggaagccgcccgggaaccgtgggaaaagggcaggccggaagaatttatttctctgtgccgaaaggagcactcgcgttttggaagcgccggcttgaagaaaacggcttgtctgtaaaagaacagatcatgctgtctgaacaagtgcttctctttaatgatacagaagacctgccgcttgccataatggaagatgaaagaagcggacagagtgaatggacgcctccgggcattaccgaaaaagaagcgatcacaggcatgagaggtgttcttctgtactcgtaccgtcctgaagcaaccattcaatttctcatagaacgctttggttattcaaagacaggagaagaacatcagattgtcaggctgcaatcggaggcgcggatcggacatattatagatgttgaccttgcgccgaaagaaacaggtatcggcggttacgggacagttcatcatgtcgctttccgcactagcgaaaaagagcaggcggagtggaaggatattcttgctgattctcatcttgcttcatctgacattcttgacaggtcttactttacatcaatctatttcagggaaagcggcggcattttatttgaaatggcaaccgatgaaccgggctttatgacggatgaatcctttgaaaatctcggaacagagctgaagcttccggaatggctggaagagcatcgcagccagattacagctgttctgcccaaaatggagaaaggagaatgatgatgaaacatgtgtttgaacagggaacgtcagaaaatgttctgctgcttttgcacggaacgggaggaaatgaacatgatcttctgtcgctcggacgttttatcgatccgaacgcaagtctgcttggggtcagaggatcagtgtcggaaaacggcatgccccgtttttttaagcggctgaaagaaggcgtatttgacgagaaagatttaattgaacggacggaagaattaaagaattttattgaggaagcggcgcaaatgtacggattcagcagagaaaacgtgattgctgccggctattcaaacggcgccaatattgcagcaagtcttttgtttcattataaagatgtactgaaaggagcggttctgcatcatccgatggtgccgatacgcggagtgaagctgcctgatatggaaggtctgcctgtgtttatcggtgcgggaaaacgcgatcccctatgtacaaaagaagaatcggaggagctttatcagtatctgacagatgctcatgcatccgtcgctcttgaatggcaggagggcggtcatcagctcacacagcaggaagcagagcaggcacgaacctggtacagtgagcgattcctataaaaaacccttagtctgcttaagcggactaagggtttctttcatcttacagccaagttgacactttagatacaggcagccggttgcttttatgtgccggcttaacggctttaccgattgaaatcagcatgacgggcacgaaacgctcgctcacgtcgaattccttaacgaattgctctttattgaatccgccgatcgcgcaagtgtcgtagccttttgctttagcggcaagcatcagctgcatcgctgctaaagaagcgtttaaaaatgctgaatcacgggcaaactgatcattttggtatgcaccgttaatctggcctaaaagcgtttgtttaatctcttctgtgatattgccttgctcagccagttcagcataaacgtcttcaccattttcatttgcttttaagtcgcctaatacggcaataactgctgatgaatcaataatctgtttttgattaaaagcaaccggaagcagggcagcttttgcttcatcactgtgaaagacttgaaaatgccaatgctgaaggttccaggcggaaggcgcttgcgttgtgatttcaaggagttctgttaactcctcttttgtaatgaccgcgtctttatcgtattctttaacagatgcgcgttcttttaaaacgtctaatacggatgtcatcatgtttcctccttcggataaacgtgttatcataatagaaaagttagaagcttactaaatgtaactcggaaactaattttaatggatcacaaaaaacttgtcaattcatagatgaagggatgaactcacgtgggatatacaatgtgtcctaaaatggaatctgctttttcccttttgggaaagcgctggaacggcctcattatccatgtactgatggacgggccgaaacgatttaaagatatgaccgaaacgataccgacaatcagccaaaaaatgctcgcggagcggctcaaagagctggaacaaaatgaaatcgtcgagcgtcaggtgctgcctgaaacacctgtcaaagtcatttataaactgactgataaaggcttggccctgcaagccgtttttcaggaaatgcaaaaatgggcagacagtttttgcgagcccggggggtctgccaacgacacatgtgatgaataacaaaggctgcccaaggcagccttttcttaatgataaggtttactcgtcataaaaaccattaatatcaaaattgttcagattgaggttcaagccttttaattgctttaataaagcatcgaatgtaaggaaatgatcatttttacattccgccggaacatcatttggagaaaatagtttcattcctccctcaatccactgtttccggtataactgaaatgctgcttcaattaaatgatcaggcgttacaataaaccctaagcttacgtcatggtcctcgctgtagccgaattcaaacccgcagcaggggcaaatatcaaatgttttttgatattcgccgttataaacgggacttgtctctaatcctttaaatccgcatatcaaacaaggatacaactcactaaccaacatacatccctcttttactcagtttgcaatcattcagaacaagcggggaggccttttacagtttcccggttaaaaactgagcctcaccaagcccgaagctccaatcggcgttcccgttttccgtaatggaaatcatgacgtcctcgggtgatatgccgcattctgtttcaagctgatcagccatcagttgatataacgtttctttttgatgttcggtgcgcgctttgctgacaatgctgatgatgacaagatctttgcttcttttgaaaccgagcccggtatcttcaatgataagctcatgaggccgatgctggtgaacgatctgataacggtccgttacagggacgtcaaaagctttaaccatggcgtaatgggcggtatccagtaatttttttaatgctgcgtcatcccggccttcaataacgtcaaaacgaagtaatggcatattttattccccctgatggttttatatcatgtcgcaacttgtaaaaaagtataacagttaatcaaaatataatcaaattataaccaaaatgtttatgcgttaatgcaatatcagagagaggcacatgttgttacaatcgcccaatcaatttcctcattttatgaatacgcttaagaataggcagacataaaggaggaaaaacatgtaccctcgtcatgcattgtatcgcgggaatttcggtcctgccggatttccggcgagaagtccttttttgttcggcgctcctttattcggcggatttttaggcggtcttctcggaggcgtgattgccacaggttttacaagaccccgctatccatacgggttcgccggttacggatacggaggcgtcccatacggcggtttcgggccgggagccggcggttatccgccattttattaaagaaaaaacggcctgcatcgcgcgggccgtttttttatcttaaaatctccacttccgatagattgtagtcttcctgttttgaaaacataacttcaatcatcccgtctttatagactgcttttgttccttttcgtttgacgaggctcggaaggacgatttctttttttccttctcccagactgctgttctctacaacgaggctgtgtgacgtatgcttaatcctgatacggtcgagttcttcttgttcggcaggaattttcgcaaaaacatgatcggatgtttcaaaaaggtcaatttccggcttgggcggttccgcttcgaccggctcggcatttttggacatgggatcgcgaaaagggaactgtccggcataaccggcgccgaatacgctttccattactcggttgacatatgtctcgacatctttcggatcagcatttttaaacgtttctttagagaactgattttggaagggaaaatatttgttccaatcaaacacggcatctcaccctttcttaacggacaacatagtatatgcccgccggaagcttcccgtgatataatataatctgtttacagaaaggtaggggaaggccgtgcaagggaataacgcaagaaaaggaatcatttataccgcttgttctttcgccatgtgggggctgtttccggtctattggaaacttcttgaacaaatacccgcattggacattttagctcaccggattttatggtcatttgttttcatgtgtgtgcttttaactgtgcttaagaagtggaaaaccggatggcgtgaactgcgtcttttgaaatcggaagggggcctgctggcgctttttttcgcttccgttttaatttccgttaattggtttgtgtacatatgggccgtcaatcacggctttttgcttgaagcaagtctcgggtattacattaatccgctcgtttccgttcttttgggcatcctattcttaaaagaaaagcttaacaaggtgcaaacagcagccgtttctattgccggggcggccgtgatcatatctgcgtttcaatatggcgcggttccttatatcgcattgctgcttgcattcagcttcggcctgtacggtttatgcaaaaaaagaacccgcatgtccagcacgatcggactgacgctggagacgcttttgattaccccggctgcacttatttatttaggatatacagctgacgggagcgcttccgggtccttgggggcaggaacatgggcgctcctatttttcgcaggcgtatttacggccttgccgctgttgctgtttgcagagggggcaaagcgtctgccgctgtatcaagtcggcattttgcaatatatagcgccgaccattacccttatgctcggcgtatttgtgtatcatgaaccgttttccgggcaaaaagcgttcaccttcatttgtatatgggcagcattgcttttgtttaccttttcacagatcaaatggaagcggccgataaaaagccgctaagcctttcgctttccagcgatagcttaaattatgtataatcattacgagtatgtaaaggagctgtacaatgggcactgataaagacatagcaaaagcctatcaggcactgtggaataaccgcactctcccggcttcaacccttgaagaagcggagaaggcaattgatcttgaactgcttgatcaaagaacacatccgaggctccggaagacacccgaggaaaagtttgctctggcggtgcagcgaattgtagattcccggctgcggccgattgagaaatatgaattggttgaactacatacgaagcgtttgcaatttttaaaagaagaaagaggggagcagctatgaaagcgatcataaaagaagatgtgcaaacttctttagagcgatatgccgatcgtcctgtatatatccatttggaaacaacgaccggttcttattcagcgcatctgaatgagaaaaacatgacggttgtagcctatatacgcaatgcaaaagtgacgtaccatcaggcgaaaatcaaaggaaacggcccgtaccgcgtcggtttgaaaacagaagagggctggatttacgcagaaggtttaactgagtatacagtagatgacgaagaccgcttgttaatggcagggcatctgccgggcggaaaattggcgatttcgcttcaaatcagcgaaaagccgtttacagtttaaagaaaagggtgaaaatcatgaaagaacatgtactcgtcatcctgcctcaccctgatgatgaatcatacggagtggcagggctgattgctttacacagacaaaaagatattcccgttacgtatgcatgcgcaacgcttggcgaaatgggccggaacatgggagatccttttttcgcgaaccgtgaaacactgccgctgttaagaaaacaagagctgatcgacgcatgcaaagcaatggacgttactgacctgagaatgctcgggcttcgtgataaaacacttgaatttgaagatgacgagtggctcgcggatatgatggaagagattatcgacgatgtaaaaccgagtctgattgttacattctatccggagcacggcgtccatccggatcatgatgcatgcggcgaagcggttatcagagcgctttacagaaagaaaaaagaggaccgcccgcgcacgctttgcatggcaatcacccgcaacagggaggaagccgtcggcaagcctgatgttattcttgatattaaagaggttgccgatattaaaatgaatgcattaaaagcgcaccgcacccaaacggaaggcatgctgagagagctggaagaaaaaataaaaaataacgagccggttcttcagacatggtttgaagaagaagtgtattggacatatccgtggaaagactgataaaaaaaaggataaggctgaaatgccttatccctttttttgtgtcagatcggaagcgatcgcttccgcaagcgaagaccgtattgataaatttgaaaaactcagtccgagctgcaccgcggtttgggcgatttcaggacggattccggataatgtcgctttcacgccgagcattccgagtgattcaattaaggtgaaaagctgttgggcaaccatcgtatcaatcatggctacgcccgataaatcaatgtacagctgcgtgatgcgcttctctgaacactggtgcagcgtattctccaaaattattttggctcttgccgtgtcaatatccccgatcaacggcagcagtccgacattgtcaaaaagcacaattaccggcgagctcagctcggtgatcaattctttttgcgcttcaagctgaatgtttgtgtttttatacatttcctctatgaaaatatgaatcaccacatcaaacgatttaatcagcgtatggaatatatcttcggcatcttcttctgtcaaggtgtctgaatgaagtctggtaaactgcttgacatggccgacatacaaatcacgaactctgataaactcgcgaataatataatggatgggcgtttttaaatgttcttcatcccgtgcggcttcaaacgcccacttttccaatgccgctgcatatacttccttctcttcagaaaaaatccgattgagctgataattaaacgccagattttgttttttcagattcgtgagtacagccgggtcagtagaagcataaacagaatcaggatccgtatcatgaagggtatcaaaccatgtctgactgatgtcctccgcccgttcagttaaataatcgtacagcagtttatgttttggcattgctgctcctcctttatgaaatcatcatttttttcacataatgcttttgcagtttcatcagtctgaagaataaaccgacagctcctgcggcaagtcccgcaattaacccgatccagtagccgtatgccccgaggcccgtataagtgccgactgcgtaaccgaccggaagcccgataatccaatacgacacaaaagccgcgccgagtgtatagttgacatccttatatcctctcagagcgccttgtatcggagctgctacggcatcagaaagctggaaaaacagcgcatagattaaaaagtgctgcgtcaacatgagcaccgccggatctgatgtatacattccggcgatttgcggcctgaaaagtaaaatgaaagccgccgtgcataaagaaaaactaagcgccatcacgatcccgatatagctgtatgagcgggcatccctgtagcgatttgcgcctgcttcaaagccgaccaaaatggtcatggccatggatacgctgagcggcagcatatacaagagggaagcaaaattcattgccgcttggtgggctgcaatcgtcaccgtctgaaaatggctcataagcagtgtgacagccgcaaaaatgctcgtttcaaaaaataccgcaaaaccgataggcaaaccgattttcaaaagctttctgcattcagacggagaaaaacggtacagtttccgaaatatagagtacccggcaaacggctcaaatctgcagacgataaaaaagctgatggcgcaaatacaccagtaagtcagggcggaagcgagccccgcaccgactccgcccaatgccggcatgttgaatttcccgaaaataaatacataatttaaaacaaaattaataggcaatgagcaaagcgtaataagcattgtgactcgcgttttgccgagtgcatcaataaacgagcgcaaaacggtgtacacaaacaaaggaaaaataccgagggataaaaagcctaaaaagtgtttggcgatcgtccggacacgaggttccagccccaaatgtcccaagatcatatcaacggtgaaaaagccgatcaggataaccgccgcactgagaacggccgctacataaacggcctggatgacggaaaacggcacttccttttgtctgccggctccaaacagctgcgaaacaacgggcgtaacggccattaatattcctgcaaggcccgtataaaccggcgtccacaggcttgaaccgattgcaaccccggctaaatcggcagcgctcactttccctgacatcaccgtatccaaaaaggtgatcagggaaaggcccgcctgtgtgattaaaatcggaatgaagatatgtaacagctgtttgaccttttggccgatcgtgttcgtttctctcaagttaggttccccgtttctttattttaacgagagaaattataacattttatgtataaaaagcaatgaaagccggcctactcttttttatccggtttcggctttttaaacatcttggcataaatgaatgaaagtgaaatgacccctaaaaaggtgcagatatattgcatcagccgtgcgaattccatatgatgtacgcctcctttcatgattatggtgcacacagcggcgcatatccatgcgcgcgatgcagaaaataagggaaaggagctgatgtgacatgcgccacactcaaatgacggaaagcgcgtttaccgctgccgttcaaacgtatttgaaacaaattacggaggatgccggaatgatactgcggacattggatgaaaaagaccaatgccttctttgcgaattagatgaactgggacatacgtttcaggaaatgcaggctgtcgcttcgtcgttttacctgcagacatatatcgaacattttacgccttcctatacagagctggcgagggccgtgcagcatctggctgaagaaaagcacggagcgctgattgtgatcgaacgtgcagatccgctggacggaataatacaaaaagggaccagcctgcatgccgagatcagtgcggctttaattgagagtattttttatcccggcaatccgcttcacgacggagccgtattggtcagagaaaatcgggttgtatcagcagccaatgtgctaccgctcacaacaaaacatgtcgatctcaaatacgggacgcgccacagggccgcgatgggactttcggccgtgactgatgcactcgtgctcgttgtttcagaagaaacgggaaaaatgtcctttgctaaagacggcggactgtatccgcttgtttctccgcaggcgcttcatgcgaaataataagaaaatgggaatattgtacccatttaatattaataaggtgaacatctttacctttttctgtattggtgttatcgtttaaatatacataaaatttaaaagaatagggagtggaaagatggcaaatgtattgatgatcggctttccgggagaaggccatatcaatccgtctttaggcgtcgtaaaagaactgaaggcaaaaggggaacatgtcgtatattacggcgtgaaggaatatgagaacaaaatcgcgtcaagcggagcggaattccgtgaatatgaagatttccgaaaagatgaacagcgggacgctaccgagtttttactattaatgattgagacttccaaaaaagccgcactccgtattcttgaggaagtaaaggatgaatcctacgactacatcctgtatgatcatcattttctggcaggaaggctcgtgagaaaccagctgaaactgccggcatattcactttgtacgacatttgcaatgaatgaagcatttattaaagaagtgttttcaaatacaaaccttgtatcagaggaatcatctcattatccggcttatactgaagcggtcagccggctcaatgaagaattcagcgcagacattaaaacgccgtatgatattttctcaaatgacggcagaaaaaccatcgtatttacttcaagagcgtttcagccgaaagaagaagagtttggcgattcttatctttttgtcggcccgtccattaccgaaagggcgacggctcaagatttcccgtttgaacagcttgaaggagaaaacgtcctgtttatttccatgggcacgatttttaacaatcagaaggaattgtttaataaatgcttaaaagcggtcagaaactttaacggaaaagccgtcatgtcaatcggcaaacatcttgatccggcggagcttgatgaaattcctgagaatgtcattgtcaagccttatgttccgcagcttgagatcctgaagagagcggacttatttatcactcacggcggaatgaacagtacgagcgaagggctttactacaaaaccccgatgatcgtcattccgatgggcgcagatcagttcgccgtcggaagccaagtggaaaacacgggcgcgggcaagatgtttaaaaaagaagatgtaacagcggaactgctcactgaagcaataaaagaattgagcgaaaatcctgaatatcagacaaaagcttctgaaatcggagaatccctgaaagcggccggcggagcacagcgtgcagcggaattgatagcagaagacgtgaaaacagccgagacccgggttctgtaatcagccgtcacccgcttcctaaaggaagcgggctttttttgattgtttttcgggaggatttttcacgccgtaaagagaattgtatgaaaaacagacaagaaaggtggaatgtcgcggaaaaaagccatgttatgaaaatgattccaaagtcttttgtgaaatgttctcaatttatgtaaaatgtgtggcattggtgatgatctaaggccaaatgaatcggaattaatgtcgacttctgaatgaatcctgcataacaggcggcgtccaaagaaaaggaacgtccctttcagtaatgataaataggaggtttttcgttatatgaagaaaaaaatcgcagccggactggctgtatctgcagtaatgacttcaaccttcgccgtgcatcccgctgaagcaaaaaccattcaagtaaaaagcggcgactctctttggaaactttcccggcaatatcatacaagtatttcggccctgcaggcggaaaataaactgaaatcaacgatactccacccaggacagcggctgcacattcctgacggcagcggcaaaaccggacaaaagggaaaacgaagcacgggtgcttacacagttacatacggagactcattatgggtgatcgcaaaaaaatacaaaatgagcgtttctgagctgagaagcctgaaccgtttgagttcagatgtcatctatccgggccagaaactgaaaattaaagggtctgccggcggcacggacggaggcggcagacagacaaagcctgataaaggcgcatcagggacttacactgtgaagccgggtgactcgctgtggaaaatcgccaatcaaaccgggatcaccatcgccgaactgaaaaagctgaatcaattaacatcagacatgctgtatccgaatcaagtgttaaagattaaaggttcttcacataacggaaacagcggcaaaacaccgccatctcattcaaacccttctgagaagccatccacttacaaagtaaaagcaggcgactccctctggaaaattgctaatcggttcggcatcaccgctcagctcatcagagaaaaaaataaattgacaactgatgtgcttcaaatcggacaagttctggtgattaacggaacgggaaaaacagaagatcctgcgcggcagccggataacaaaccggcaaagccaaacaagccgaatactcccgaacctccggtgacagggtcaaagattgacagaatgataggcgaggcgaaaaaacatgtcggcgttccttaccgctggggaggcaatacgcctgcgggcttcgattgcagcggttacatctattaccttttaaataaggtaagctctgtttcccgtctgagcacggccggatattggaatacgatgaaacatatcagccagccgtcagcaggcgactttgtcttctttacgacatataaagcgggtccttctcatatgggaatgtatttaggcggaggagattttattcacgcaagctcctccggggttgaaatttcaaacttaagcaatccatattggaaaaaagcgtatttaggagcgcgcagttatttttaaaaaaagcctttcggggcttttttttgtttaccattttcacgttttgacaagactgatgggtaaaaaaataagggggaggaagcatgaatcgtctcttgctttttctcatgctcgcatcaattacgctttgcggctgcggggggagacccgctcctgttccgcccaaaaaacatggggaaagccgcgcattggaagcatctgcataccgtgagcatggcggactcatcaatcaaaacggaaaaacgatcggatatatcgaagtgagggaatctgatgatgaagggtcagacattcatatatcagcggggcatctgccgcccggcgcttctctcggatttcatatttatgaaaaagggacttgtcaggcacctgattttgaatcagccgggggaccgttcaaccctttgaacaaagagcacggcttcaacaatccgatgggtcatcacgccggggatctccccaatcttgaagtgggggctgacggtaaagtggatgtcattatgaacgcgccgcaaacttcattaaaagaagggagcagactcagcctgctcgaccgggacggaagtgcgttcgtcattcatgaacatacggacgattatttaacaaacccgagcggaaattccggagccagaatcgcctgcgctcccctgacaaaaagcgcccgcagggaatgagcccttttgtattgagtatacaagggcttttttagtatactcggttatggaatacaaatggaaaggaaacatcacctatgacttcagaattacagcacctatcacttccggaagatatacaaaacaaactgcaggcttatcaaaatcatcccatttcccaagaattccgggatttaatcggatcatcaggctatgaggccgaagataaagcgattgtattcgatgccgtcattgctttgacaatgggaaaaaatatcttattaaaaggaccgacgggttcagggaaaacaaaattggcggaaacgctttcgaactattttcataaaccgatgcacagcgtcaactgctccgtagacctcgatgcagaagcgcttgtcggctataaaacgattgaaaatgaacagggacaggcgacaattgaattcgttcccggacctgtaacaaccgcaatgaacgagggacattttttatacattgacgaaatcaatatggcaaagcctgaaacccttccgattctaaacggcgtgcttgattacagaaaaatgatgacaaatccctttacaggagaagtgattaaggcaagcgaaggattcggtgttatcgccgcgattaatgaaggctacgtcggcaccgttccgctgaacgaagcccttaaaaaccgttttgtcatcattgatgttccgtatattaaaggaagcctcctgaaacaggtgctgacctctcagtctgtcttaaaagatgagaaattaattgagcgttttatgacgctgtcttctgatttaatcgcacaagcgcataacggacaagtgtcagaagaagcggcgtccatcagggctctcattgacacgtgcgacttggctgcgtacatcccgccgaaacgggcgattgaaagaggcatcgtggaaaaacttgacgacgacagggaaaaagccgctgtcagaaatattgcagaaacgctgttcgaatgagggacatacaatgaagtttatcaaatttaatgacagcacgattgattcgtttttgttcatgatgctgactgacctggccaaaacactgaccagaagcagtgaagttgaagtggaatacggcgtgcagtcttactacaatccctttgaaaagaaaatttacatgagccacttttggaaagaccgatcagccggggatatggaagccggcctgaaaagcgatgtctatttgcgcgctgtcggaacacgcagcagctcatttcgggaatttgcggggtttttaaatgacgttcaccggcactttacccgccaaagctttgccaagcagctgtttatgctgcttgaggatatcagaattgaagagctgatcaaaaaagaacggccgggaacgaaacgtgtttttcagaagcggagggagatgtacaggaaatatttcacgacgcagctgacattgaatttagaacggagcattttcaccgacgctttgtattgcgggatgtttgtcaagctgacggctgagtctccgcttgaaggcattccttccatgcatgaacatattgatatgatgataccgtatattgaacgtcagctcatccgggtgtatgaagcggattctacggaacagattgcaagaataacggaagacctcatggaaggccttgatgaagtgcttgagaaagatatgctgaacacgtacttttttctgccggaacttgattacgaaaaagcggctgaagagcctttattcgaaagcgtaaaaaaagcgccttcgttaagtgacgatctcacgctccctgagtcttccgacggagatgaagaaatccttgaagagaaaatgaatacgtggcaccgggaaaccgaagcgccggcaaaaagtttccttcaatttgatattgagcacggcgcgaaatcagatcttgggaaagacgcggccagagaaggcgatgacggtgaccaggcgctcggctccgttcaaggttccgcacgtcagacgaaaagagaggattactccaaactggaagcgcttgaatccattcaggatcaacatgagggcgcggggctggctgacggaaaagaaaacaaatttgccttcccggtttatcaaacgcctcataaagcgtctcctgaagaggagcagtcttataaagaacaggcaaaaacgatagaatcatatcaaaaacgcctgaagcagatgatacaaaaaacacttgagcacaaaaaaacgctcccgcggaccgaccttcacgcaggccggctgaatcgcaaactgatccgttattttacggagcggaacccgcgccttttctataaaaagcaggacccgtcttcagacattgacgccgtttttacattgcttgtcgattgttcggccagcatgttcgacaaaatggatgaaacaaaaagagggatcgttctttttcatgaagccttgaaatcagtgtccgtaccgcaccagatcgtcgggttttgggaggatacgaacgaagcgactgaaacgagtcagccgaatttcttcaataccgtcattccgtttgaagagtcgctgctgcaggcggcgggtccgctgatcatgcagcttgcgcctgaagaagataacagagacggatacgccatcagacaaatgacgaaacagctgatgcggcggagtgaggcgcaaaaatttttaatcgtgttttcagacggagagccggcagcattcggatacgaacaaaacggcatcgtcgatacgagcgaggctgtcatcgaagcgagaaaaaaagggatagaagtcataaatgtttttctgtccaatactgcgatagaagaatcacagatgaaaaccattcaggatatgtacggaaagtacagtatttttgttccggatgtcgatcagctgcccgatgtgctgtatccgctcttgaaaaaactgcttcataaaagcataggataggctttttcctatgctttttcgctttttattttaaaatgatttaattttttcggtattgatctgttttttttactattttgtgaacaatcaaggtagaatccaaacgcaatcagtggtaaaatatccttggaagcgtttttattacataattttgggcacagcgttcaaaagttatttcaagatagtgaattgatcacttgattatctaggttgggggtaatattcaaatgtttcaaaataatatgaaacaaagaatgaattgggaagatttttacggaccgaacctcggctatgcactggagctgtacgaccaatatgctgaagatccagacagcattgatccggatctgaaagacatgtttgacgaactcggcgctccgccaagccaaataaaagaggcatcgggaacaaaggaacagggacgcgtcaccgcagatctgattcaaaagatcgcagcagcagttaaacttgcagaagatattcgaacctatggccatctgaacgcttccgtcaatccgctcagaaaggatccgaaaaagagcgagctctttccgttatccgagtatgggcttacagaagaagaaatgaaagcaatacccgcgtctgtcatctgtaaagacgcacctgccaatataacaaacggcttagaagccatccagcatttacgcaatacctataaaagaaccatctccttcgagtttgaccatgtgcatgatttcgaagagcgcgcatggattacaaaaatggtcgaatccggagaactgttccggaaaaattcaccggaaaaactgtcagccgttttagaaagactgacggaagtagaaggatttgaacaatttttacaccggacattcgtcggtcagaagcgtttctcaattgaggggttagacgcgcttgtgccggttcttgacgacattatcgcccagtctgtgaaagcgggcacaaccaatgtcaatatcgggatggcgcacagaggccgtttaaatgtgcttgcgcatgtgctcggcaaaccgtatgagattattttctcagaattccagcacgcgccgaataaagaccttgtgccgtctgaaggatcgaccggcatcagctacggctggacgggcgatgtaaaatatcacctcggtgcagacagacagcttcaggatgctgaaaccaaaagcgcgcggattacgcttgcaaataacccgagccacttggaattcatcaatccgattgttgaaggaagcacgcgggcggcacaggaaacaagaacgcaaaaggggtacccggttcaagacgaaacaaaatcgctcgccattttaattcacggtgacgcagcgtttccgggagaaggcattgtcgccgagacgctgaacttaagctctctgaaaggctatcaggtcggcggggccattcatatcatcgccaataatatgatcggctttacaactgaaagcgatgaatcacgatccacgaaatatgccagtgatttggcgaagggctatgaaatcccgatcgttcacgtcaacgcggatgatccggaagcatgcctgtcagccgttaaatttgcggttgaataccggaagcggttcaataaagatttcttaatcgatttaatcgggtacagacggtacggccacaatgaaatggatgagccgtcaacgacacagccgatgctgtatgacgccgtcagaaaacacccgactgtcaagcggatctttgcggaaaaactcgtaagtgaaggtctgatcagcgaggaaaaagcgcaaaacatcgaaacggcagtgacaaaacgaattgaagacgcctataaaaaggtgcccgccaaaaaagaagacgccgtacgggaaattgaattgccggaaccggtgtccaacggttttccagacgttgacacagccattgattttgatgttctccgcaagctgaacggcgaacttatcaactggccggaatcttttaacgtgttcggcaagctgaaaagaatcctggaaagacgttcaaaagcgtttgatgatgaccgtaaagttgaatggtcattggctgaatcgcttgcgtttgcttccattttgaaagacggcacgccgatccggctgaccggacaggattcagagcgcggaacgttcgctcaaagaaaccttgtgctgcatgacagcgaaacaggagaagaatttgttgccctccatcacttagacgactgcgctgcttcatttacggtgcataacagcccgctctctgaaggatcggttctcggctttgaatatggatacaacgtgtattcgcctgaaacgctcgtgatgtgggaggcgcaatacggggactttgccaatgcggctcaagtctattttgatcaattcatatctgcaggacgggcaaaatggggacaaaaatcaggactggtcatgctgctgcctcacggttacgaagggcagggccctgaacactccagcggccgcgtcgagcggttcctgcagctggcggcggaaaacaactggacggtggccaacctgacaagtgcggctcagtatttccatattttaagaagacaagcgaaaatgctgcttcgtgaggaaatccgcccgcttgtgatcatgacgccgaagagcctgctgcgcaacccgaatacggtatctgaagtgcaggaactgagcgaaagccgattcaagcctgtctatgagcagtccggtctttcccatgcttacgaaaaagtgactcgcgtcgtattatcaagcggaaaagtgtcaattgatatcagcgatcacttcaacaaaatggaaggcgataaggattggcttcatattgccagaatcgaacagctgtatccgttcccggcaaaagatacgaaggagcttttcgccaaactgccgaacctgcaagagatcgtttgggttcaggaagagccgcagaatatgggggcatggagttatatcagcccgtatctgacggaaatcgcgccaaaaggagtaaatgtccaatacatcggccgaagaagacgatccagtcccgcagaaggagatccgacagtccacaaaaaagaacaggaacgcattgtatctgatagcttgactcgcaaaaactaagggggaaatgaaaaaatggcggaaattaaggtacctgaattagcagaatcaatctcagaaggaacgatagcccaatggttaaagcagcccggtgattatgtagaacagggtgagtacttgcttgaactggagacggacaaagtaaatgttgaattgacagcagaagaatcgggtgttctaaaagaggtattgaaagattcgggtgataccgtccaagtaggagaaattatcggtaccattacagaaggcgctggcgaaagttctgcacccgccccttcagaaagtgctccagccaatgaacaaacgaaagaggaagcaaaagctgaacctgctgcacaagaagtcagccaggaagcacaatcagaagcgaaatccagaacggtagcgtctccggctgcacgcaagctggcaagggaaaaaggaattgatctatcacaaattccgacgggagacccgctcggccgcgtgcgcaaacaagatgtagaagcttatgaaaaaccggcttcaaaacctgcggcacagccgaaacagcaggctcaaaaaacacagcaaagctttgacaaacctgtcgaagtgcaaaaaatgtcccgccgcagacaaacgatcgcgaaacgattggttgaagtgcagcagacttctgcgatgctgactacatttaacgaagttgacatgacggccgttatgaatctaagaaaacgccgtaaagaccaattccttgagcaaaacgatgtaaaactcggtttcatgtcgttctttacaaaagccgtcgtggctgcattgaaaaaattcccgctccttaacgctgaaattcaaggcgatgagctgatcgtgaaaaaattctatgacatcggtatcgctgtcgcggctgaagaagggcttgtcgtcccagtcgtgcgtgacgctgaccgcctgacgtttgccggcattgaaagagagatcggcgaacttgcgaaaaaagcgcgaaataataaattaacattaggtgagctgcaaggaggctccttcacgattacaaacggaggtacattcggatcgcttatgtcaacaccgatcctaaacagccctcaggttgggatcttaggtatgcacaaaattcagctgcgcccagtagcgattgatgcggagcgctctgaaaaccgtccgatgatgtacatcgctttatcatacgaccacagaattgtagatggtaaagaagcggtcggattccttgtcaccattaaaaacctgcttgaagatccggaacagctgttgctggaaggataatttgagacagacaaaaagtacactgcccttacaagcagtgtactttttttattgagagaaggggagaatgtatatgaaaagctgttatccgcttgagatcgaatttgaatataatgaagaattgcattctatcactccggttcttctgcaagacgaacatgacacgatattaatagactgcggatatcccggttttacaaaccatcttcaacacgctgctgcccggcatggtatgtcgcttcattcattgacaaaaatcattgtaacgcatcacgacatagaccatatcggctcactcgctgcattacaccgtttgcatccggatatcagcgtgacagtacatgagcgtgaagcgccgtatattgacggctctaaaaaatctttacggcttgagcaggctgaatcaacgttttgttcattgccagaggatgcaaagccttatgcaaaacagttcatccgctcgcttcaatcagtcgaatcggctccagttcaccggacagttactgacggcgagctgctgccttggtgcggaggcattcgcgttgtagccacaccgggtcatacacccggccatatcagtctttatctgcctgccgaaaaaactatggtcacaggtgatgcggtcgtcattgaagacggaaagctgaaccttgctaatcctagctatacgttacatatggatgatgcggtccgttctgtgcggcggctgctcgattacgatatccgccaattgatttgttatcatggaggtctatttcagggggatgtgaaaaaagcgcttttgcgtctgtttcgtgatctgcagaataaaaaaggataggagcggccagcctatcctatccttgttcagttatgaaaacggaatctttgccgtttcttcttcttcggtgctgtttttctcttttttcttagaccagtaggtggcaagaacagaccccgacagattgtgccatatgctgaaaattgcgctcggcacggctgacaaaggggagaaatgcgctgtcgcaagcgctgcacccagtccggagttttgcattccgacttcgatcgcaatcgctttttgtgaagcataatccattttgaacagctttgcagtcaggaatcctaacaaatatccgattccgttatgtaagatgacgacagacacaatcagcagtcctgattgaagcagatgctcacgatttacgctgacgacagaggatacaatcgctacgatgccgattaccgacacgagaggaagcgcgtgcacggcttgtccgacctgttttttgaagaacagcttcacaatcaccccgaggacgatcggcaaaagcacggcttgcattatggaaacaaacagtgaaccgaaagaaacggggagccactctttcgcaaacagcataataagtgccggcgttacaataggagcaagcaatgttgagatcgtggtgaccgcaacagaaagcgcagtattgcctttcgccaaaaacgtcatgacgtttgatgccgtaccgcccggacagcatccgaccagaatgacgcccgcggcgatttctgcggggaggcggagcccgattgataaacagaaagccgtaagcggcataatcgtaaactggcaagcgactccgatcacgacatgccaaggctttctgattaattctttaaaatcgtctgcttgaagagttagccccatcccaaacataataataccaaggaaaatcgtcatataagaactgatccaagaaaacaaatcagggcaggcgaatcctaaaccggcaaagacgataacccacaagccaaaggtttggcctgcaaacccgcttatttttttcagccattccataaacacagctccttttacattcaatcaatcagtcagaaaatatgactgacttttctgtattccattataaataattttctgaataattcaatattaaatataagttttcaataaaattattatgtaaactaacatcttcttgactattcagacatatattcttacaattgatttttatactgaaatgaattgggagtgctgaagtgaaagaagctaatcaatggtcatctaagctgggatttattttagctacggccggctctgcaatcgggctcggcgcaatatggaagttcccttacgtagcgggaaccagcggaggcggcgcttttctgcttgtttttattttatttactgttttaatcggactgccgcttttacttgctgaatttattatcggcagaaaaacacaaaaaaacgccgttgaatcctataaggcgctcgcgccggggaaaaagtggcactggatcggatatctcggaatcattacgtgttttattctattatccttctacagcgtagtggggggatggatattaatctacattataaaaggctttacaggcggcttatcgctttcttcgggatttgatacgttatttatcgataccatttcaaacccttatgcagcggttttcggtcagctgctgtttatcgtgctgacgattttagttgtggcaaaaggggtgagcagcggaatcgaaaaggtaagccaggtgctgatgccggctctgtttattctgtttattctcttaatgatccgctccgttacgctgcatgatgcagcgaagggattaaaattcttctttatgcctgattttggcgcgatggatgccaataccattttatatgcgatgggacaatcatttttctcgttaagcgtcggagtgtccgtaatggttacatacagcgcatatttagaaaaagaagaaaatattgttcaatccgccgtatcggtgacggtattaaatgtccttgttgctgtgatggcgggagtggcgatttttccggcggtgtttgcattcggcctcaagccggatcaaggcccgcagcttttatttaacgtgctgccgaccgtctttaaccaaatgccgttgggcatcgtgtttttactcgcctttttgctgctgtttttatttgcgacgctgacatcggctttttcaatgcttgaaattttagttgctgttttgtcaaaaggcgattcggcaaaacggaagcggtatgcatggatcgggggacttgctatatttattgtcggggtcccttcggcgctgtcgtacggaattttgagtgatgtttctatttttcaccgcagtatttttgacgctgcggattttctggtcagcaatgtcttaatgccgctgggtgcgcttttaattgccgttttcgtaccgctgaaaattccgaaacagatgctgtttgacgaactgaaaagcggttccggtataaaacgaaaatggtttgcagtctggctcctattaatccgttatctggctcctgtagccattattatcgtttttctgcacgtgcttggtattttttaaaccaaaagaagcaggcccccgttcaggacgggggcttttttaataaagcggccatatcacgcggtgcgcttgttcgaaccgtttctccgcctcccgccaatcaacgacattccaccattgatccacgtaagccgcgcggtcgtttttatattgtaaataataagcgtgttcccacacatccagcggaagcaaaggaatgacgtcccactggctgtagagctgatgcttctcagcggccaaaatctccagccgcccggcgcgcggcgcccagactaggatagcccagccgactccttcgacttttttcgccgcttgagaaaattgctctttaaaagcggaatagcttccgaatgacacatcaatcatttgaaagagcgcacccgtcggccgtctttttccgtttggattcatcgaaaaccagaaaatactgtgcaaataatggcccgcgccgtgaaacgccaattgccgctcccaatgcgccactaagtcgtactgtttcgtctgtctcgcttttttgagctccagttctgctttattcagaccgtcaacatagctctgatggtgtttggtatggtggagtttcataatctctcttgaaatatacggttccagtgcggaataactgtaaggcagtttagggaggacatgcttgccgatcggcacataagctctgcgctcatccggctcttcgggttcagtaatgtcccggtaaagtgccgatgcctgttcataccattccgcctccgttaatccatcatcctgaagggtgtgaaaaatccggtcgatttgtgccgcgaagcgatcgaaccggccttgctgaatgacttgttccttcaaggtttcacaccaattcagcatctcggtttgataagcgtgccgtttcatttttcttcctccttttcactcactttcataaaagtgctgagcgcaagcaaagaaaacacatacgggtagctgtgatacctgatgtaaaactgcttcggcaggccgattccggtcggatagctgaaagcggcgccttcgtaatgccggttttcaataagaaaagatatgccttttgtgacggcttgatgatgagttttttcgtattgcagcaaagcttcggccgcccaagccgtctgtacaagcgtcccgtaataaagcggaacataggttttgacttctgcgcttttacaggattctccccagcttccgtcctcgttttgaatggacttcagccagcggatcgctttttttacggccgggtggttttggctcacgccgcaagccttcatccctgtcagcgccgcccatgtgccgtaaatatagcagacaccccatctgccgtaccacgatccgtcctcttcttgatggcggatcagccattggacggctttttcaatctgagggtgatcagaagaaagccccgcttctcctaaacagtgcagcacccgtccagttaagtcgcttgttgaaggatcgatggcagcttcctcagccgattccagcggcagcaggcggaccagcggatgattgacatttttctcaaaagcagagaagccgccgtcactgttttgcatggacaaaagccagctcagtccgcgttcccatgaggcgggataaagttttcgcggaatggctttgagcactgcggctgtgtcatcacaatcaggattatttgtattaatgtttgaaaaaccccatcctcccggttcagcatgcgggttgtgaacggcccaatcagcgactttcgtctgctgccgttcacgcagaaaccgggcggcgctggttatcatctgatcgttatctgagataccgcttttcataagcgcatagttgagaagcgccgtatcccaaacggtcgacgttgaattttccaggtacggtatatcgccgcaagacgtgagcaaagctttcgtgccggcaagtgcttttctgataacgggggagtggcgcgatacaccgagagcgagcaggccgtacaccataaaaatagtggcgctcgcatagctgtataatgtgccgtcttcctcaatccggtcaagcatatacgttttggccgtacgcagaccgagctggtgaaaagcggcaggaatctgccaaagccgcttccagtgcgcgaaaagagaagagaggtctctgttctcatcctgatcggaacgaagccatgtaaacggatttttagtcatatgccgatctaaatgcgcgagagacggaacgttgggatttttcagcgaaaatcttttgttaagcgtcacggccatcggtacaaaatgaatacgggcgtatgtactgaactggtaaaaatgcagcgggaaggatgggggaatgactaagaaagataatggcagatgcagcgcgggccatggataaaggccgtttgccgcaagcatccactttgtcataaagtgtacgttgcgcaagccgccatttgagatgataaagcgttcggcctgaatcatatgcgcctcagaacggctatataaaccggaagccagcaagccggcatagccctgtacagtggcggtcacatttcctttccggtcatcaggatagttggcaaaagttccgtccggacgctgtttagcgcgaatgccttctgcaagctcagcgatcagttctttatcattgtctccaagagaagtgagaaggaggatcagaaaggcgtttgtcaaaatcggtccttcaaaacaaaatgaccatgagccgtctgcattttgcgtttctcttaatagggagatggttttcttttggcggcttctgacgttttcatgaattgtgctcacactcgctcaactccttcagaagcatatatattcatatgtaaaaggcggcatgacaaaagaaagaaactgctgacaggcagcagtttcttgtttgatttaatcttccagattgatccagacgcttttcacttctgtataattattcaacgcgtaagagcccatttcccgcccaaggccggattgcttatagccgccgaaaggagatgcagcatcgaaaacattgtagcagttgacccaaatagtgccggcttggagacggtcagcaatgtaatgggcgtttttcacattctcagtccaaagtccggctgcaaggccgtattccgagcggttcgcccgctcaatgacttcatctaccgtatcatacggaatggcggctaaaacagggccgaaaatttcttcttttgcgatggtcatgctgtcatccacatccgcaaatacagtcggggagacaaaatacccttcttcaaacgggcagctgccgcccgcgacagctttggctccttccgcttttcctttttcaatatatgaaagcacgcgctcatgctgttcctgactgacgagcgggccgatttgtgtatcttggtgaaggccggcgccttgctgaagcgatttcgcatatgaaaccatttcgctgacgacctcatcatatttgtctttgtgaatgaagacacgggagcctgcgcagcatacctgcccctgattaaacatgaccccgtttaaagcgccgggaatggctttctttaaattggcgtcaggcaaaatgatattaggtgactttccgccaagctccagtgtcacgcgtttaattttttttgcggctttttccatgatttttttgccgatttctgtagaaccggtaaaagcgagtttatcgacatcgtcatggttggtcagcgcttccccggccgtctcgccgaaccctgggacaatattgatgacgccgtcagggaagcccgcctgatctattaattccgctaaatagagggcggtcagcggtgtctgttccgccggtttcaaaacgattgtgcagcctgtggcaagggcggcgcccattttccacatcgccataaggagcgggaagttccaagggatgatctgccccacgacgccgacaggctcatggcgggtgtaattaaaatatgagccggcgaccggaatcgtttgtccggttatctttgtagaccacccggcataataacgcatatgctcaattgcgagcgggatatccccattcgtcgtttcattaatcggttttccgttatcaagtgtttcaagctgcgcgagttccgttttgtgctcttccattaaatcggcaagcttatacatcagcctgcttctggaagcggccggcatagtgcgccattcgccgtgatcaaaggctttgcgtgccgctttcactgcactgtcaatgtcttctgactgtgcctcgtaaagcgtcatcagcgtttctccggttgccggattcggtgtgacaaatgttgatcctgaagcgctcggaacaaattttccgtcaatataaagtttcttcgtgccctgtaaaaatgtttccagcctttttgtgatctgcatcgttaaagaactcattcgtaacaaacctcccgaaatttttttatggtctgttttgagcatcttgatgtccgcgcgaagtaagcgcatacagtcattttataataacacctccggtaaaatcaatcgataaccgttattgcaattcacaagaaaaaacggctacaataagcttatcgattaagaaaaggagttttataaatgattcataataattggcagacaaaagaaagcgtcaaaaaggtcaaatgcgtacatacagatgcgaaaaaatacattgtcaaaaatgtgctgacgtcgggtaaagagtatgaagtcaaaaatgaaacagaagaattcatttttgttgtagacaatacaaacaaagtcggaggcttctacaaagagtattttgaagaagtttaaagctgaatgaatttattttgcctgagccatactaaaaaagactacatataaagggtggctgcaaaatgaaaaaaacagagcaagacaaacaaaataaaacattagatcagcttcagcaagtgcaacctgaagaaggcaccgacacgacgatggaacaaatttcagatacctataaagaaggaacaattgaagatacggatcgttgatgttttgttaaaaccgcggcattggagaagccgcggttttttatggcgaaaataaaaaactgacttttcgaaaaaaataccgttttcttgaaaccttttctttcgctgaaccgtactacttcataacagcggcacctttcgcgaagggcttttttgatgaacgttctaaaaatgtaatctgttcgtaatggtttaaatgccgtctatgtcgtattcttatatagggataaagaacttatttttttatgattgtaataaaacaatagtatagaagcagaaagtggggttcttcattgggaattttttctgtcagcagatcaaccgacacaaaaaagctggaggctttgctcgttgagggagaacggatcgaaacgatttataaactgcgggttgaccaaatatgctttacgaataaacgagtgattttctttgataataaaatgttctccaaaaagaaagtgcgcgtatttcttccatataaaacaattgaaagcttcgccattcaagaagcggggatgtttgatcccgataccgggcttgtattaatgacaaggggaaaaactttcgaattggaatttgcaaaagaaacggacttgactgaggttcaagccatcttaacaaaatacttatgcagttaaatatcacataaaagccatccgaatgcatgcggatggcctttttattatataatgctcgtttttccggagttcgaatcaatgagatccggatcagcaatagaactgatggggatataaatcggcgccaaatcaccattttcttcaccgaatccgtagttgatcttattggataaaaaataatcgatttgctgatacgggccgatcgtaatggaagaaccgcggtcgactgcatttactttaaatcctcctacatttaccaaaaccggcgaaaacatcataatgggcctccttttccggcagggattttatcgcatgcagactcaaaggcagatggagaatcaatttgatcccggtcatccactttgctgtgcgtgccgatgaagccgcttgcatctccgaagttctgtccgtatccctgattctttttatcagaattctgccattccgccagtaaattttgtccgacattcaccgctgaagcattttcaaaggaattaattttcaacatgaaaatattaatattgatatatggagttggttgaaccacaggcaaacctcctttaatacaggtgtatgccggctgttatgaccgtatgcttagacagggggcgataaaaatggatttcgataagatgaagcagtggatggaaatggcgcaaaacatgtccggcggcgacttttggaaaaacgtttttgatgatgaacaactgaaatcatttcaaaacggccattctcattttccctttcaacagggagatgggcaaatgagaagaaatgaggatgcttttcctcttatagatattgtggaaacccatgatgagctccaatttttactgtatctgcccggctaccggaaacaagatgttcagctgctgtcctacggagaatatatcgtcgtaaaaggcacgagaaaatccttttttaatgaacaggattttaaacagaagaccggaaaatacggcgattttgaaaaaaaactcgaccttccgcattccgctcaggggacgaagggaatgcaggcggtattcaaagacgggattttatatatatcgattgctaaacatctgggggatgcaagccagatcattatcgaaggctgatcttgttcgcggtgccatctattaaatctgaatcatcgatactcatgatagggatgacgacaacggtgcaatcaccgttttgttcaccgtacccttcatttcttttattggctgctgtgtttctcaccataatggaagagccggtgttaaaagctgctccgccgctgattccgttcatttttatatactcaaagttgataacggatggaaaaaacatcatgattcgcctcctttttgtatatcatgtttatatattcgcaatgcgggacgcatagaactttccaagagtgacggggaaagaagtgattttctttgaaaaaaataatgaaagagattttcaaaaaagtgtgtgaagaagaattagaccggcttaagaaagtggaacaacagcttgatgagcttcaggataagtgtcattttgagccgcaaacggttgaaggggaaaaaacatatgtccatattgagcatgtcaaagtggacaaggttgaatacaatattgattttgaaaagctgagtatagaagagctgagcggtatgctgaatatcggcgccacttaccatacaccggagcataggcttaaacaagcctgcgctgaagaatttcgggacaaccggcaaaatgatgctgcgaaagaaaaaagacagacaaagcagcagacacccaatgtcaccatcagggggagaaagcattgacctccgttgtttcagcctcctttttctagggtatgtattaacagatgcagcgaagaatacagacgaaaaaggagatgatgaatatgtcattatcaaaagaacagcaggacagcctttatcataaattaatcgatttaaaggaaagtcttcagggagaatcaaaagaaaatcattcaatgagcgaagacacaggagaactatcgaacggagtagataatcacttagctgatcacggaagcatttatttggacagggtcacgaatcagacgctggacggtgtcgatcagaatcttttagatgaggtgaatgccgcgcttgaacgaatggaaaaaggaacatacgggatttgcgagaaaacgggaaaagaaattccttatgaaagacttgaagccgtgccgtacgccagaatgaccgtcgaagcgcagcgagaaacagaaggggatgtgaaaacagacgctccgtcatatgaaagggaatttcacgagcaggtgaaagacctctcaaataaagaaaccgttgatcaaaaaagctcacaaacttacgaaatcctggatcgcgagcaggattcacaataatagcagcaggtacattcatatgtacctgtttttttattccataaaaaatctcaaaatcgaaataaaatcattgactttatataaaaaagaaagtaacatactatttgtaagtaaatattaaaagattaccgggaggaatttagaatgtctcaagtattatttgtaaaatcaagtgatcgtacggctgaagaaggcgtatccgtaaaattatacgaagcgtttctggctgcttataaagaaaacaatccgaatgatgaagtgatcgaacttgatcttcataaagaaaaccttccttacctcggaagagatatgattaacggaacattcaaagcttcaaaaggaattgaaatgacagacgaagagaaaaaacaagcatcaactgctgacatttacttaaatcaattcgtcaaagctgacaaagtcgtgtttgcattcccgctttggaacttcacagtgcctgctgtgcttcatacttatgttgattacctgtctcgcgcaggagttactttcacatacacgcctgaaggaccaaaaggtctgatgggagataaaaaagtagcgctcttaaacgcacgcggcggcgtatattctgaaggaccgatggcatctcttgaaatgtcattaaacttcatgaaaaccgtcctcggtttctggggtgtccaagatcttcacactgttgtcgttgaaggccataatgctgcaccggataacgctcaagcgatcattgaaaaaggactgcaagaagcgaaagatctggctgcaaaattctaatttccattaactcttgcgcccatacagggtgtgagagttttttctattatagaagaaactggcggcagctttcgatctgatcttatattgatatattgatattttgtcgaaaaaacaatttttatgtagaataaagcatttttcacaaagaaaaaaggttttctgtaaaagaattaaccctcttgccaaaatacgactgatggtgtaggatataagagaagctacattgttcgtattgttaattaagttttaacctttaagctgtaatagggagttttatatcgaagccggaatgtcatgcctccattgcagaggacgacaggaacgcttctgcaaacacccactttgaggagtggtggtttaaaactttcttacttgcgtacggcatacgtagcgaaagccatttcccttgcggagatggctttttattttgcattgcccttgagcagcgtactttatcagtatgataaaataaaagaatcaaagacaaagtgaggttttacaacatatgctggataaagcccaatcccttctggcgcattattttggctacgacagtcttcgcgcgggccaaaagcaggcgatacaatcagttgcagaggagagaaaaaacacggtctgcattatgccgacggggggcggaaaatcaatctgctatcagattcccgcactgctgtttgaaggaaccacaatcgttatttcccctcttatttccttaatgaaagaccaagtcgacgcgcttgaagaagcgggtatcgcggcagcttatattaacagcacccagacaagccgtgacattcatgagcgcctgaccggtttgaaacaaggggcttaccggctcttttacatcacaccggagcgtttgacttcttctgaattcattcacatcctgcagaatattacggttcctcttgtcgccattgacgaagctcactgtatatcgcaatggggacatgatttcaggccgagttaccggaatatcgaaatcctttttaatgaattaaaagaaccgcccgtcatcatcgcattaacggcgacggctacgcctgaggttcatgatgacatctgcaagcagcttcatattaagaaagaacaaactgtatataccggttttgccagagagaatttaacgtttaaagtagtaaagggcgaaaacaaagaccggtttatcgagcggtatctggaaaaaaataaacacgaagccggcattatatatacagcgacaagaaaagaaaccgaccgtttatatgagaaattaaaacgcagcggcatcaatgccggccgttatcacggcggattggcggatgatgacagaaaagaccagcaggagcggtttcttaacgatcagatacaagtgatggtagctacgtccgctttcggaatgggaatcgataagagcaacatcagattcgttttacacgcgcagattccgaaagatatggagagctattaccaggaagccggacgggccgggcgcgatggtcttaacagcgagtgtgtgctcttgttttcgccgcaggatattatggtgcagcgttttttaatagaccaatcggccgccggagaagaaaaacaaaagcaggatctcaaaaaactgagacagatggtggattactgtcatacggaagattgcctgcagcggtttattctgaagtatttcggcgagaatgaggcggcagcttgcggagcatgcggcaattgcactgatacaaggaccgcccatgacgtcacaaaagaagcgcagatggtattgtcatgtattatcagaatgaatgagcgcttcggaaaaacgatggtggcgcaggtgcttagcggctcaaaaaataaaaaagtgctggaaaacggcttcagcagcctgtccacttacggcattatgaagcatcaatccgcagcggaaatcagtgattttatcgaattccttatttcagatgaatatatcaaaatggcggacggcacatttccgacgcttatggtcacccaaaaaggcagggacgttctgcttggaaaaagcgcagtcgcgagaaaagaagccttacaggccgccgccgttaccgaaaatgatgaattatttgagcttctccggcgtctccgcaaagagattgcagctgaacagggtgtgcctccatttgtcgtgttctcagatcagacgttaaaagaaatgtcggcgaaacttccgaaaacggatcaggatcttctttccgtaaaaggggtcggggaacaaaaaagattgaaatacggagcggtttttttagaagaaatccgaaattatgtaagagaaacagagtgaaaaaaagtttttttagaaatttgcacattgtgtttttcattggcgccggaaaaatcagaggcttgaaaacccttgctgtatcaagatttcagcaagacttaccaagcgagagaaatgtttcatgtaaaggaactgtaatctaattcaaatcgttttgttattgaactgacattttcatatgttacgatatcacctgttagccgccaataaaaagctaacaagggaggatttacttatgaagaagacgattatgtcctttgtcgcagttgcagcaatttcaacaactgcatttggagctcacgcttctgctaaagaaatcacggtgcaaaagggtgacacgctctgggggatctcgcaaaaaaacggagtgaacctaaaggacttaaaagaatggaatcagttatcttctgatttaatcattgaaggagagaaactgactatttcttcagtagaaacaaccacatctgggcagtacacagtgaagcagggcgacagcctctggaaaattgctcagaaattcggaacatcagtcggcaatctgaaaagcttgaataacttgcaatcagatataatttacgcaggcacaacgttaaatgtgaaaggtcaggctcaggctgcacagccggctcaagaagccagccagccgcaaactgaacaaaaaccagctgccgagacagaacagccgaaacaagaagctgtcaaaaacgagcagcctaaacaagaacctgttcaagaacaacaacctaaacaagaagcgaaggctgtcgaagcaaaacagcagcctgttcaatcaaatacaaaccaacaagagcctaaaaagcagctgacaatgactgcaactgcttactctgctaacgacggcggcatttccggtgtaacggcaaccggtgttgacttaaacaaaaaccctgatgcaaaagtcatcgcggtagaccctagtgtcattccgcttggctctaaggtttatgttgaaggttatggagtggcaacagcagcagatacaggcggcgcaattaaaggaaataaaattgacgtatttgttgcaaagaaaagtgacgctaacaactggggcgtcagaacagtaaacgttaaagtattagactagtttcatatagagatgaagaacacaaggcgaaatgctttgtgttctttttttcttcccttttttgactgtatataatcgttatatgcggaaaaagaaaaagcgtttctctaatataataaggaatggatgtgaaaacggaatctgaagggatgtatgaaactgatggagccggaatttatatgtttatggaatgccttcacagaatcaccggtgtttcaagcaggtatatgcaccgctttcgccattgtgctcgttatcggactgtctatgcctgctgtcaggctgtttcaggcgcttgacagagggagaggaaggccggccgttattgaaaaggtgagacgtactggcgtgatgaagaatggcaggcacgagcttgtgcttattttaaacgtaaaaaaccaagacggaacgcatgataaacgtgaactgacacacgccgtatataatgaagagatcagccgtttttatgaaggagcttccgtatgggtgacggcagcggctggcggacgaattatgatcgctccgcgcacgccgcggcataaggcgtcaaaataaaaagacggggcggttttcccgtctttatgtattaatgccgatcgatccatatccgtccgccttctgagccggcttctatcctgcatgttcctccgatcgggaatgtcatcaaaggggaggtatggccgaaatcagcatttgcgataacaggcatggatgacagttcttcttttgtacggatgacggcacagagagcctcctcagacacatttgaagcatgctggaaacgtccgatgacaattcccttcacggctgaaaaagcgggaagatggatgagtgactgcaaatcccggtcaaacatatgaatgtccgacatatgatcatcttctataaacagaatcacttgttccatctccggaaagtattcggtgccctgcagaagattcagcgtgcatagatttcctccgatcagtgttccttccgcatatccgggttgaataacgagcggtcccggattccgataaaaacgtctgtcctcctggttcaaataccatttatcatcactccactcggatgaaggctttacctcatacgggttgtcagaagcacagcaggccaagaaagagtcaatcgtatagtccagcccttttttcatggcaaatgaagaaaaatggggaccggaatatgtaataaggccggttttttgatatatggcatggcagagagcggtaatatctgaatagccgcaaaggattttcggatgccgcttgatgtttccataatcaagatagcggagcagctgatttgattggaacccgccgagtgtcgtcaaaatcgctttgatgtcaggatcagcgaaagcctcgtgcagatcccgtacacgcgatttaatggatgatgaatcaaattcatttatttctttcgcattctctgaaaaagagacacaaaagcccagctcctccaattttgtcttcgcggcatttatattttcatctgacataacggacatgcttgtggccggagacacaatacgaatgccgtcaccttttttcaatttttccggatacaaaaaaaaccctccttaaatggtttaatctattacaccatattaacgagggtttatctatcattttttacaggtcgacccatttaatgccgcctgattgcgtatcattgtcaatccagacatcaaagtgatgcttttcataaaaatgaatgagtctgtcgacatgatcccaatcacgcttagcgatgtcgcccgtcactttcgggatattctgctctctggcgatatgttttaaaaatttcatgcagatcgagccgtagccgtggttcggcgggcctttaatgtccccgatatgaatggcattgtcataataagaggcgatcagtgaaaaacagcctcttccccggtaggctgactcacagtcagtcagcataatcttacatgtttggccatcatcaatcgaggaaacaatgatccaatcgtcattgttcgattgatcaataccaagcactcgcgcgtcttttgatacatctatcagattttcccgcattctgaaaatctgaaattcaagtttatgaagctctttttccagctctttctgatctctttcttctgcagtaaacaaaatcatactcctttcacagcgtaaaagtcttagtcaaacacaagtatccattttagtaaatgatgtcttggtttgtaaataggttttgcaaaaacttttttagaaaagtctgccgtttatatgtggattaacgtttttaaggcggtgcggatagggaaaggaacagtgagcagcggaaaaaggaggaatctataatggcaattgactcactcatcggcaaattgaagtacgtaatgacggaatctcctgataaaatgctttccttatatgtaaatacggatatgagaaatccggatcagcaggggggagagtggaaaatcgccttgaaaaccggttttcggagattaaaagagtatctgtctgtaagtgatccggaagaagaaaaatctctcgtccgcatcatggaacgtgtctatcaatatatcgatgggcttggtaaagagatgccgcgtagtctcgtgttttttgcatcgggagaaggcggtatctgggagacgattgaattgcaggtgcctgtcgaaacacgattttattgggaagaaacggctgtccttgatcaattagaacttctccgtgaacaatttccgagcacggcttttattctcacccagcagaatgaagtgaagatcatagaaaccgtactcggaaaaattgaaggggtggagcattatcaatacgacgtcatcaatgaatcgtggaaaccgcaggatgtaagcggaaacttcgcatcgatggacgaggacgccgccaaagcccacgtcgaagaaaaccaaaacaggctgtataaacgattggcttcgaaccttgatcagaaggccgcttcacaccaatgggagcgtctcgtaatcgcaggggacaaagaaacagccgatattctcgatcagcacatgaataaaccgattgatcggatcattccaaaaaatctgttgaatgaaaacgaacataaggtgatagaagaactgttgaaggaagcataatatgacgaaaggccgggtctcaaacacccggtctttttagggcttaagtttgtctaatttctgacgaagcgggcgaaaccgttgacatcaaagctgaattctcataccatttggatagtcagtaaaattgagagaggtcataagatgaatcagacagaaaacaaacctaaaagttataccggtatcgtgctgacattgaccgttctgatcaacgggttaattgcggtgctgttttttatgccgaagtcgggacaggtcagcattgccaatattcatattctgccgatgttaaatgccatttttaacagctttacttttatctttttgctggcagcgctctttatgattaagcaaaaaaatattcaagcgcataaacgctttattttggcggcgtttacgacgactttgctgtttttgatctgctatgtcgtgtaccactcgatagctgagaatactttattcggcggccacggcatcatgcgcgggatttacttctttattttaattacgcatatttgcctttccttcatcatcgtgccgcttgcgctgtttacgctgatcagaggattcagcatgcaagtggagcgccacaaaaaaatcgcgagatggacgatgccgctctggctgtatgtcagtctgacgggtgtcattgtatacttaatgatctcgccgtattattaaaaaaagccgtgctccgcgcggcttttttctattgattgaaaaaaggcgcctcatacagggcgccttttactcttcaagcgtttcaagtgttgttacatttaaggattgttcaacggtttttgtttttgcttttactttttctgcgtacgtgtaatcaccatagcagtagggataacggaaattgtctttgttccctccgcaagtgtaaagtttcggattctttttgacctgctgctcggagtattgttttgccagttcctcagtatgtgatcctccatgttcagctacaaaatcaatatagccggctcccatgttgtagctttgtataatcgtatccaagtctacgccttttttcttgcctgtttggtacatgagagtgaattgtttgattccctgtttgatactggtttgagggtttttaatctcatttcgctttaaacccagagattctgaagactgcatgggatcatttcctcttccttttgactcctgatatatcatgccgagtacaagcgatgtatatttggtgagtcctttttcatccagctcgtcttcaacgagcggtttgtaatctgtcagccgttcaagcacgatcggcttgacatcaaacggaagacttttgagccattcattatttgaaaataacagaatgaggaagaaggaaaccatgacaaaaacacatatcatcataagacccgcggcagcgaaacagccttttttctttttctccactgtgtttcaccctcaatttcaggagcattatgactttttcattatgacacagatgaatgcgcgaaaccaagcggaaacccgtatttgaaacataaatttaaaataacggttcttttgtcaggcgcaggatgtatctgcatcaattgacatttggtataattgggctacttgagaaaagaagggtgaggtatatgactgaatttcacgaatccggaaacacaaatgaccccgctgtcgatttagatgaggaaactttatttttggttgcccagacttttaaggcgctgtctgatccgaccagaatcagaattctccatttgctgtcacagggtgagcacgcggtaaatgatatcgcagaaaagctgaatttgctgcagtctaccgtttctcatcagctgcgttttcttaaaaatctgcgcctcgtcaaatcacgcagagaaggaacatccatctattattctcctgaggatgaacatgtgttagatgtgcttcagcaaatgattcaccatacgcggcacgattaaaaacatccctgcttttgagacagggatgtcagccgtactgactgttattggtttggtctctgctcgtttttaaaacataaaaagagaagccgctgtaataaactgcgatgaaataaaagatactgatggtcagcggatcggcgccgaccgtttggctgtatgcctccggatgggtaaagtccgctgtgacccggtaaatctcaataacgcgataaacaaatctcgataggaataacgttaatagaataagttcaatccacaggtgagtgcgaaaatatatttttccgcggcgttcttcaaaagaaatgttccgtttagcaaacaggaccagaagccagccgcaaaaagtgccgaatataagatggccgtataaagccgggtgtgtgatgctgaaaaacgccagagctgcggccagcaatgaaaacaaaatcattcttgtataaagccagcggggtttcaaaggctgaaagccgacggaccgtttcacctttttatacagaaaaaaggcaatcattaagacagggcagatgctttgaagtgtgatatgcatggtgtggaactccccctccgttgagtagtgtatgcttatccggctggttttagtagtctgatttattcacaggctgaaagcatcttttatcacattatgcacgtttctttttttggcataagagaatcgcccgcgcctttttcaggatttaaacataaaactcttgaaaaactaacggtgttagttataataaaactaatgatattagttttagggggatgttgatgagaatcttacaatacggaagtgtttggcagctgactttttttccagcgcttttcccggtgaattgttatttggttgaagaagaagaaggagtaaccctgattgacgccggactgcctaacagtcataaaggaatcaaacaagcattgcggcagcttgggaagccgctgaatgacatattactcacccacgcgcacggggatcacatcggttcgcttgactcattagctgcggaatttccggatgcttccgtctgtatttctgagcgggattctttcttgctgaaaggtgacacttcattatttgagcatgaagcacaaacgccgataaaggggggagtgccgaaaaatgttcagaccgaacctgatcgcctgctgaaaggcggcgagcggatcggatctttacttgtcattcccgctcccggtcatacgccgggaagcctcgcttttaaagatatgagaaatgatatgctgatcgtcggagatgcctttcaagtacggggcggccttgctgtttcagggaagctgaaatggaaatttccgtttccggcttttgctacgtggaataaagaagaagctgtaaaaacagcaagaacgcttatcgctcatcaaccaagcagtctggccgccggacatggaaatgttctctgcaatcccgttgaaatgatggctgaggctgctgaggaagccgaacgaagcctgccgggaggccgatcataatgtcaccgagagtcggaatgagccttgacatgatattgagagccgcagcaggcatcgctgacgaaaaagggctgaatgaagtgacgcttgcggctgttgcaaagtccttaaacgtaaaaccgccttccctttacaattttgtcaatggccttcaaggaattaaaacagagctggctgtctccggtttaactatgttatatgaaagaatggcggcctctgcagaaggactgacgggcgaaacggctttgctcagtcttgccgatgcctatatcaatttcgccgaagccaatccaggattatatgacgcaacatttcaaaagataaaagacggccggattgagaatctgtcaagcctgcttgtagagcttgttgtcaggcagctgacagctaacggttatgcacagtctgacactgcgattcatgctgcgagaggactgaggagccttcttcacggatttgtcgtgttgagaaaacagagtgcatttgaattaaccgaatcaattaaggaaagccggaagtttgcagttgttgctttcctaagaggtttgcagaataggggacaataatattattatgtaaactaaataaaagacgcatcatgtaaaaaggagggacaaatggattcattacaacatatcatttgtgagcggcgcacctattcacatatttttgattctcatgcacacacatactgccaaatgctctttccgctcgaaggacagctggacctggagacagaaagacgtaaaatcagattaaaacctgatcaaatgctgtatattccgcccgggcatgaacatcggttccgttctttggagcgaaatgaatgtctcgttctcgacataccggcatactttttcaaaagttcctttgactccggcattctgaataagcttgatcccttttggacatcgattcggtttctgctgacagaagagacaaagcagcagtcggctcattcattgagtctgcttgcagaatatattgctgaaaagatacaagaaaaccgtacgaataattcaattgcgtatatccgccgaaatctatcaaaggcttttacaattaaagagcttgccgcaatggaacattaccacccggcgtattattccgactggtttaaaaagcagacggggaaaagcccgcaagcttatattgctgagctccgtatgaagaaagcggaacaaatgcttattgaaacaaaatgccggctgacagacatcagccaggaggtcggctttcaaaatttgtcttcctttaccagatggtttgtcagacataagggaataacgccgcgcgtcttccgaaacacctttcaatctgataaataattctgaaaatcggttaaataaactgcttctttttttggtatcatgattgtaaaaaaggagtttttgatatggcagtcatcgaagattttatcaagcttgatcttagaataggaacggtcgtaaaagcggaagtattcccggaagcaaaggtgccggccattaagatgacaatagatttcggcgaagagatcggcatgaaacaatcaagcgcccagattacaaaacggtacgaaccgggtgatctgacgggcaaacaggttaccgctattgtcaactttccgccgcggcggatcgccggatttaagtcagaagttctcgtactcggcggcatcccggaaaaaggagacgttgtcctgcttacgccagagcagacagtaccgaacggaacgaaaatcggataataaaaaaagacgtttgcagaagcaaacgtcttttgcgtattgaggcgatacaccacacgccacattcgtgtgtgccgcaagggcatgtgcatcggcttacacaattcagctcatcgctatatcaatatagcatggcgtgtgcggaaatgcaagagattttttaatatatgttatatctggctttgttttgccgatccccgatctttcgtgtaaggtttcatttgaaattttatgatcttgaataaagcagttcgacaaatgcaagagattcatctaaccttatatctcgtggtaaaatttagggagaaagaagcggaaaggagacgtaaatgaaagtatttgaagcatcctcgttaatctcagccgcagaaaagcgggcaaaacaatacgatcagattagagaacaatttatcaatctcaggaaagcttttcaggggatggctgacttagacgacagtgagttttcaggcaaaggcgccgacaatatcaaagccttttttcaagaccacgcaggcgttacagacagctggcttaatctgatcgatatgaagattgcttttcttaacagtatctcaggaaaagtaactgatgcgggattagccgattcgtttgtggaagagtcctttttagaacacgagctgatccatgcgaagaataaatcacaagctatcatgcaggagcagcgcaatgaaatgaaaggtatccttgatgaaatcagagatatcattcatctagaagttttctcgacagaagatgttgatcaaaagctggattcagcagataaaaaacgggatgagaccatacataaactcggcaaacttgatcacgatctaacgaaagaatacgcagaaaccgaggcaaatgaacatttcatccaagctgactttcaacagcttcaaaatgccacgggtaagggaaaaaatgcaacaccacttcactataacgccaaggcgtacagagaaagtgacatacataagaaaaaaggcgagattgcaagacactcagacacatatttaacgtttaagaaggaagaagcaaaagagcgggaaatcaaggatttgaagaaaaagctcgccgatggagtaactgatccggatgaatacttagagattgcgaagaagatcggttacgagaaccttgaaccttcccagcagcagtatgtgatgcagcttgaacaagcaaaacagatggaagaagccggagaagtgacttgggatattttaaaaggagccggcgtcggtctttatgatgtcgggaaagacacggtaacaggtttatggcaactgatcaataagcctgatgaagttgttgaaggtatcataggggcagttgctcatccaattaacacgtataatgccatttcaacagctattgaggaatcgtatcaaaaagatatggtaaatggagatgcgtattcccgatcaagatgggtggcatatgcaattggttcagcagctgtggctgtcgtcggaacgaaaggcgcaggagccgttaacaaagctgatgcggcggggaaggtcataaacaaggcaggacaggcagggaagaaaattaaagacgttaagattgcagatttgcttccttataactctaagtatgatcttgctctggcgggtgacgtaccatacaatgtggttgacagccaaaaccttaaaaataaacttttgaccaatgcaaagaaaatcccggatggaacgagaaagccgtttactggtcaagaaataaaccttccttggttaaataaagaaaagtatggtgcctttgaggttaagggcaaggtaaaagcaaagggaaaagttaaagacataagccgcagagtgtatactatgaaagatattgatatgaaccaaaaaaatcgtaaaggccttacgaatcttcaattaatgaaaagtggaaatgcaccttttgcgaaagatgggacacaaataaatctacaccatttaattcaagaggaacctggtccaatgcttgaaattccaaatagcttacatactaaatatagcggcattatccataggcttaaatctgatggtgaaagctttagaaacgatccggttttaaaagcccagtatgataatttccgagacaggtattggaaatggagagcaaaacaatatgaaaaataaaaaaggaatgagagatatcaatggacttatatgaaaaaactatagagtttataactgaaaataaagcagacagttattttactagaggaataagtgaaaaagagattattaatatagagaaggagctccaactacaccttcctgatagttataaatggtttctgagaaactttggctctggcggcttatatggaattgatattttagggtatgactttggcggggcttcggtagttgaaaccacagaggaatatcgtaattattatcatttatctgatggacttgtgatactagaagatattgatttttttgcttatgccttagatactaataaaatgaacagtaataatgaatgccctgtttttatttgggatagagtgcttggatatcaagacaagctagccgacagctttattgaatttttctacagaaggttgcttgaaaaaaaagaaaactgggaagaagatgaagactgggacgattaataaagaaagctctcttttagagagctttttttaggttttcaatttttaacaggctttataatgagcaaacaggcattactcaaaatactcgccgcgcctatccaaagcagccattgtgttgcggtcagccatgaggcagttaggataaagagtccaatggcaattgatatataattgccggctcggtccagtttgcgtttgcgatgaaatttatatttagcatgagaaataaattgatcaattttatctttcagctcatagcatttttcctttatcgtatcctctgtttcttttacttttcgataaagcatattattcatcgtctgcactcccatatcgccgttttgaaaattcagccatgattttttcttcatagtcatctgagatgaattgtgcctgatcttcaactttcaaatgtactttttcttcaaaaccatcctgttcttcaccatcaaaacgataaagtttttgcaatagcctccagaatgtttcaatttcatcagttgtgaagtcatgaaacatatccgctaaaaaataggtggatttttctgaacaggaaattaacgctttttttccttcaggggtaatctcaatattgattgcacgtttatccagtttgcttggcacagtgtgaacatatccttttttcgcgaggcttgaaattaatttgttagcggtttgttttgttgtgcccagctttttagcgatattcataagtgtggtatcttccgtcggtaaatgggcaatagcaataagagtcatgtgctgtcgggaagtcagcatttctaagtattcgtccccccgagcctgcactttattgacaaccgaaaataatgatgcgtaactttgctgcataacatgcagttccttcattaataatttaatatccataagttatctcctatctaaatcgtcaccatgttgacaatgacaatatacattgaaatgaaaaacaagtcaacatggtgactaatagtagcggctacggctgttttcaaaaatgtcacaggcagtcggagtgtttacaaaaggggaaataagtataataaatgcgaaaagggcattaatctaaagtgagaaggtgtttggcatgcagaaagtgaactggtcagaacagtatgaatggttcaataaacaagatgaaaaagacgggtgtttaatggcgctccttcgtcatgagcttacatatgaggaagtcatacggttatatatgaaagggttttatttgaaatcaaaagaaggggatgtttcgttacgtaagaacgatatctgtcgtatgtttggggttgaagagaggcagggcggcaaatcttaatgaacgggaagagaaaaactcttcccgcttttcatggcagctgttattctttttccagcatggaagtcagccattctcttaatgtattcttctgcacataccgctttccgtttctcgtgatatgcggaatgtcagaggtgtcgggcacgatttgttttgcttcttccttcgtaactcctaaataataaccaatatagaagtgcagatctttttctttaatgagaatgtggtcagtgtgttcatgaggatcaggtgatttaaagtttttcaatccgtctccgatgaaatatccggctaaagcgattccaatgccggtaatatatccaaacctccaataaacgttatcattttggattcagccttcagcaaaaccgtcgggcgtttattgcggacggttttgattgctgagcttttccacctgcacctttccggagaagaaaacagcgcctccgcccatatccgccagccgatcgggcgtgagcgaattgacgagctgttttttatcatccatatcggcccaaagaccttggctgactgcaacgccgggaagcacctgttcgccgaccgaagctgttaattcacactcgccgcggtgattccaaactctaacggtttccccgtcttctatgttccggcgtacagcatcctctgtatgaataaaaagctttggcgctttttccagttttacgtgtttttcattattcgaaaatgtcgaatttaaaaaattatgattcggtcccgggacaaataaaagcggaaaatcgtcatcgctctcaagagggatatgtgtcggcagcgcgggataaccgtcctgtttcatcttttccgaatataattcaattcttccgctcggtgtcttgagctttcccggaaaaagcggttttttccgtttggctttcatgaaggaatggcgtgagagcgcttcgtaatcaatatcctcgatatacggattgtcgggaaagtccagcgcctgtctgatcaattcttcatcggaatcctgaagctcctgctcggtaaatcccattgccccggcaagcaaacggaacacttccgtattcgatttgctgtccccgtagggttcgatcaccggtttttgcagctgaataaaatgatgccagtaagacgtgtaaaaatccgtgttttcaaaagcggatgcagcagggagcacgatatccgcatatttggcggtttccgttaaaaacagatcgtgaacgactgtaaataaatcctcacgcagcaggccttttctgactttattcgcttccggcgcaaccactgcgggattcgtaccgtaaataaacagggagcgcacgggcggttttgtttctaacagaacgcttccgagcctgttcatattaaatgatcgtggctttttgccgtaaagcagatcaggccgctggagcgcttgtctgttatagtttaataccgcgctgttgtgcttgattgcgcctccaccggtgttgagccactgtcctgtaacagccggtagacaggcaactgtgcggacgatcattccgccattgtcatggtgctgaatgccgtttccgatcctgataagggaaggggaggtttccccgtacattctcgcaaggcgtctgatatcgtcggctttaacgcctgtaatagcagaaactgtttccggatcatagtgttgaacatgcgcttttaattcgtcactgccttcggtgtattctgtgagaaatgcttcatcgtgaaggttttcgtcgaataagacatgcatgataccgagggcgagtgcggcatctgtgccgggccgaatgggaataaaccaatcggcaagccggccggtttggttcttatgtacatcgataacgacaattttagccccttttttccgggctttttgagcaatcatgacttggtgcatattcgtgctgacggcattgatcccccaaaaaataaagagctttgcatgtatggtctcctccggatcagtacccgctccttcacccattgtatagttatagccttcagatccggctttgctgcaaatcgtccgttcgagatgactcgctccgagacgatggaaaaaacggcggtccattccctctgccgccagttttcccatgttgccgtaaaagctgtacggaagaatgctttccgctccttcttcggcaataagctctttccagcgcgcactgatcgtattgaacgcttcctcccaggaaataggcgcaaacgcggcttcaccttttttaccgatccgttttaacggaacggttaagcgcttctcatcataaatacgctcagccatgtgtctgactttgttgcaaatattccctgatgtgaccgggtgatcggggtctccctgaatgttaacgatttttccgtctttttttgtcacaagcaagccgcattgatcgggacagtctagtgagcataccgacttaaagaccccgttcggctgtgttgcagcagaattcatagcccatttctcctctttgtttatattgtaagcattataacatttcaaaatcgaacgtcaattcagaaaaaaagtgttgacatcacggaaagacttttctatgatgagtttattcttttaaacagcctgacaatttcatcattttattttctatccagagaggtggagggactggccctatgaaacctcggcaacatttattgtgccaattccagcaagcgcatgcttgaaagataggaaagaatgatctatacatatttgtgcgcttcaagcgcataaagacggtatatgaatctctttccttctttggggaaagagatttttttatgaaaaaatttatgtgaaaaggatgttttgcaccatgacggttttaattacctcgccatatcacgacgaggggctgaaggagctgactgagctgttcggccggactgtgcaccggccgtggaagaagaacggccgggcctatcgggaagatgaattaatccgaatgattcaagagacaaacgcgtcggggcttattactgaacttgatgaggtgtctgagcgtgttattgacatattgcccgattccgcttttatcggtgtctgcagaggaacgccgtctaatgtgaatattgcggcggcgactaaaagaaaaatccccgttttctttacaccggcccgcaatgcccaggctgttgctgaaatgtttatcggaaatgtgatttcatttttacgtcatacgtattcttcccttcagtggctgaaggacgggaagtggaatggtgaatatttgcaggcttacgtcaaattcagaggaaatgagctgacggggaaaacagtcggccttatcggtttcggagctgtcggacagagaatcgcccggctattggccgcttttgactgcaaggtgctttactatgacccatttgtccgtcatgaaaaccgggagtatgaaaaaacgacgattgaacgggtattttctgaaagtgatattgtttccgttcacttgccgcgcacagaagaaaccatcggccttatcggcgcccggcactttcaattgatgaaacaggaagctgtttttgtcaatacgtcaagagcggcggttacagacagggaagagctgctgcgggtgctgaaagaacggcggattaagggagcgatccttgacgtgttttatcacgaaccgcctgaatcttctgattatgaattgatctctttgccgaatgtgttagcgactccccatttagcgggcgcaacatttgaagtggaagatcatcatgtgaagattttaaatgaagcgcttttcaaatggaaacaagatcaaacctgctcaatacgtgaactttataacaaaagagaacttgaaccggaaggaggaggctgtaatggatgaacaaaaaggctaccttgtatttgacatcgggacggggaatgcgcgagtcgcggtcgtgactgccggcggcgatgtgaccgcgcttgaaagggaagacattgaatatgtgacggatccgctttatccggacggacgatatttctcaccggaagagttatggaagcaaatcagcgctatggcaaggaaggttattggcaaaagccctcatattacattaatcggaatcacctcaacaagccagaggcagggaattgttctgatcaataaagataaaaaggcatttctcggtctgcccaacattgataacagagggcgtgaatgggaagacgggattgaggcaaaagaagaagtgcatcagcaaaccggacgtcttccgagcgctttattttccgccatgaaacttgtcggattaaaagctagacagccgtctttatggaaagaagtgaagtacatcacaagcatcagtgactgggtgacatttgagctgagcggtattttaagctatgaaccgtcacaggctgctgaaacactgctgtttgacgtaaggaaaaaggcgtggtcagagacattatgcaacatcttcggtgtgccttctgccattcttccttcactcgtccgatctgggacggttgtcggaatgttaacgtttaagaaaacggcggttctcggtctttctgaaagagtgcctgtgattgcaggcgggggagacacacagcttgccatcaaaagtgcagatgcaaagccgggagatatcgtcatcgtatccggcacgacgacgccgattataaagataacagctgagaccggaaccgaaagattagagaatgcatggctgaattgccatacagaagaaggtcaatggcttcttgaaacgaatccgggtgtaacaggactcaattatcaaaaattaaaatccattttttatccgaatgaatcctacggcgtcatggaacgggaaatcgcaagtctgccgaaacatgatcatgcttgtatttctgcgttaggctcctatttatcgccagagaaaaacgcactggcaaaaggcggatttatttttgacgccccgctgtcccaaaacttaagcagagcccattttgtcaaagccgcactgctggaaatcgctttttcaatcaaatggaactatgaggcgttaacagaggtggcttccttttcaaaagattatgtgaaggtgtgcggcggcggtttccaaagtgatgctttgacacagtttcttgctaaccttctccaaaagaaaatttataagagagaggggttcagccaggcatccgcaatgggagcggcgatgatttgcaacgaagctctcggtgtgaaagcagagctttcgagccgcacaaaggtaattgagccggaagcggatcagacggatctcttcctatatgaagaatggaaatatacgcaaaagttatttactcgttttcagccggcggtgaaagcctgacttggggatgagatgacaacatgaaagtttgctgaggaggaacaaaaatgcttaataaaataggaattccgaaacagctcgcctggggatttttgggagtcgtgctgtttatgatgggggatggccttgaacaaggctggctcagcccgtttttagttgaaaacggcttgacggtacagcaatcagcatccctgtttacggtttacggtatttctctcgctgtggcgtcttggttttcaggggtctgcctcgaagccttcggcgcaaagcggacgatgtttatggggctgttgttttacgttatcggaacagccgcgtttatcgcatacggatttgaaaatcttaatttgccggtgatgtatgtcacgtattttattaaagggctgggttatccgctgtttgcctattcatttttgacatgggtgatttaccggtcgccgaaaaacaggctcagtacggcagtcggctggttctggattgcatattgctgcgggatgtttgtattcggtgcttggtattcaagctgggccatcaaatccttcggctatttgaatacactgtggagttcaattttctgggtctgcctcggcgcgttttttgctttgattttaaatagggaccgctttgaaaagaaaaaggcagataagcgggaaaaggcgcaggaattaatgaagggaatcaccatccttgctgaaaatccgcgcgtgctctctggggggatcattcggatcattaacagcattggtacatacggatttccggtatttcttccgatgcatatggcgcagcacggcatttctacaaatgtatggcttcaaatttggggaacgatctttctcggaaatatcgtctttaacttaatcttcggcgcagtcggtgatgccttcggctggaaaaagactgtcatgtggttcggaggagtaggctgcggcatttttactcttttattatattatgctcctgttgtatcacatgggaacttgcttttcgtcagcattgtcggttttatatggggagggctcctcgccgggttcgttccgatcggggctatcgtgccgacggcggccggcagcgataaaggtgctgccatgtctgtgttaaatctggctgcgggcctgtcggcatttgtcggccccgcgcttgcctgggcgttcatcgggcttgtcggcgcacaaggcgttgtatggattttcgcagcgctctatttcgtaagtgcaatcttgacaaatcaaatcaaaatgcctgaagagaaaacggcaaaacacaataaagcattgcctgaatacgcttcttaacagcagcgccccgaaaactcggggcgtttttttacagctgctgaagaaacccggcaaagcgctgaatttgttcacgtaacgattgtttgtttttgtgaaattgtttgaaacgatgtccgtttgctccggacggatgcgggaaaccttccagaatgaccgcatgactcattctgccgttcttcttcagcatgcggcaggctgattctgctgctttgccgagagggataagcagaatgtccttttccatcatttctatttcatccggaaaacatttcagcgcgtaacggctgagaagagctgatctgctgattgccggccgatgtcccgtatagtttttctgtttataaaaaacagggtgtttgataacggacgttgtatgaagaagctcccgttttgaatcaaataaccgggatgaatcctcaacgtgaagcgcggccggcagaccgcattcattaagcatttcgatgatgttctgtctcattgaaccggaaagtccggccgcttcttttgtttcatacgctatcgtttcaagcgtttcgccatcttttaaaagctgtgccgcttttttgtaagccagctgcatttgaaaaaaaccgggtgtgattccggaaatggcaacgactgcatgagggttaatatattcattatgaggcgaataatacaaatccagatctccgtccttggctaaatggaaagccggagtcagcaaatccgattttgtaaaccctcccgaatatgatagtgctttaagctgctgcaaaaaatgcgcaagccgctcacgatcgcaaatcatgttatgcctccttgaatccgccagtttctcttagtgtcatcaaaaacgtcggatgacatgcaggctcatacatcacttttaccggcgttccagagcatttttaaggcgtgaggcgttcctttaacttcggccgccgtcgtttgcacggctgtttttttagtgagaaaatcttcctgcagttctttttgcttttgcgataacagaacggtttctgttttgatttcatcaacggacgtctgcatggacgctgctgtggtgttaatcttctttatatcaggcgctgtgtttcttttaaaacgcacggcggatacgcctgcataaatgaatgcggcagccgcaacggcagcactgatatacaaaatgatgatcatctgcttttcactcctttttttcagttgataccctttacggatcgtgttgaatcattttatttgctaattgttttttttctgcttataatgtgaaatcgtacataaggacattcagaaagggtgaaagacgtggaaagcttacaaaacaaaacggctcttatcacgggtgcgggcagaggaatcggccgcgccgccgctatcgctttagccaaagaaggagtcaatatcggtttaatcggccgcacagaagcaaatgtcgaaaaggttgcggaagaagtgaaagcccttggtgtaaaggcatcattcgctgctgccgatgtaaaaaaccaaaaagaggttgaacaagccgtctcctctattaaagaagaactcggtgagattgacatcttgattaacaatgccggaatcagcaaattcggcggatttttggatcttacgcctgaagagtgggaagacatcatacaagttaatgtaatgggtgtataccacgtgacacgcgccgttcttcctgaaatgattgagagaaaatcaggagatatcattaatatttcttctacggcgggccaaagaggcgccgcggcgacaagtgcgtacagcgcttctaaatttgccgttctcggtctgactgaatctctcatgcaggaagtcagaaaacacaatatccgtgtcagcgcaatgactccgagcacggttgccagcgacatgtctattgaattaaatctgacagacggcaatccggaaaaagtcatgcagcctgaggatcttgcagaatatatggttgctcaattgaaattacatccgcgcattttcatcaaaactgccggtttgtggtcaactaatccttaaacaaaaggggacctgtcttcacgacgggtcttttttgttcccgcaaacccgaataaataggcataaaaatccgtttttgcagaaaaaagagtgaaaaagaaactgctatcagctataattaaactaaataaactatgtaccaaatgttcattaagattattttccccgcctccaaaaaacaaatctatacaaaccaaactgtccgaacgataaaagggaaaacgggatataaagagaatatttagtacatggaataatttgttagaaggaagggtgtgcacatattgaaagaagaaaaaagaagttcaaccggttttttagtgaaacaaagagcttttttaaagctttacatgattacaatgacagagcaggaacggctttacggactgaagcttctcgaggtgctccgctcggaatttaaacccatcggttttaagccgaatcataccgaggtataccgttcgcttcacgaacttttggatgacgggattttaaagcaagtaaaagtgaaaaaagagggagccaaactccaggaagtcgttctctatcaatttaaagactatgaagctgcgaagctttacaaaaaacagctgaagacagagcttgaccgctgcaaaaagctgattgaaaaagccatttcagataatttttaaatccggccggaacgcagccggcctcccgggctcaaaaggtttgtaaggtatgttctgtgattcattatacataatagcaggctcggaacaatacatatcaatagaaccttcaaacttgacatcgactcttgaagtggtaacataaaaaacgtgtgaaaaatacgaacaaaatacgaacaagggagatgttaccgatcttagatcaaaagaaagttgcttttatcggagcaggatcaatggctgaaggaatgatatcaggcatggtccgcgcaaaaaaaattcccaaccaaaacatctgcgtgacaaaccgccgcaatacagagcgactcgctgaattggaacatcagtacggaattcagggcattgcttttgacagcatgaaaaccgaagatattgatgtctttattttagccatgaagccgaaggatgccgaaatcgctctggctacgctgaaacggcgtattcaacctcatcaaattatcctgtctgttctggcaggcataacaacctcatttatacaacaatcattacatgatcgtcagcctgttgtaagagtgatgccgaacacatccagcatgatcggcgaatcggcaacagctgcggctttcggagaccatgtctcttacggttcagcaaaaaccgcggtatcccttttggaatgcctcggggaagtgtacgtgatcaaggaagatcagatggacattttcaccggcattgcaggcagcggaccggcgtacttttattatttaatggagtttattgaaaaagcaggtgaagaagccggcttagacaaacggctgtcccgcaaaatcggcgcgcaaacgttattgggcgcagctaaaatgctgatggaaacgggtgaaaaaccggatgtgcttcgggaaaacatcacctctccaaacggcacgacggaagccggcctcgatgcgctcaggtcagaaggcggcggagaagccattgccaaagccattaaacacgcgaccgaacgttctattgagatcagcaaaacaattgaaaaaacggcagcactataatcgttaaaaaacaggagtgatacagtgacgtctcggacgaagatcaaaagagtcgcggtgaaaatcggcagcagctcactgacgagcctgcacggggaaatcagcagaagaaagctggaagcattggtggatcaaatcgcacagctgaaagacagcggctatgaagtgattttagtatcttccggcgcagtggcggcaggttatcggaagctcggatttattcagaaaccggaaagcctccctgaaaaacaggcttccgcttccatcgggcagggattattaatggaggcttattcaaagctgtttttagcgcacggttatgtcgcatcacaaattttaattacaagaagcgacttttccgatgaataccgctaccataatgtgcgcaatacgatgaacgtccttttggaacggggcattattccaattattaatgaaaatgacacggtcacagtcaatcggctgaaattcggagataacgatacactcgcagcgaaggtggcaggtttaattgatgccgacatgcttgtgattttatcagacattgacggtttatatgatgataatccgcgcagcaacccgaaagcgaaaagaatcagacatgtaagtgacatcactccggaaatagaagcaagcgcgggagatgccgggagtgaaatgggaaccggcggaatgcgttcgaaactggatgcttttaaaattgtgatggcctccggtattaaaggctttctcgggcaggccaacattccggacattctgcttcaagcggtagatgagaaggctgaaggaacttattttgaagcggaaggaaccctgccgttaaaccacaaagaacaatggcttgcatttaattccggccccgaaggcgaaattgtgatggaaaaagaaagcagccgcgatgtcgcgaacggaaatatggagctgtcaccgcaggacatcgagcagattaagggcagattcagcagcggagcggttgtcaggctgcttgatcagcagggagaagagctcggactcggcatcgtcaactattcctcagcccagctgaagacttttaaagaaacgccgcataaacagaccgatcaatcagtcattgatccggaagcgtttgtctgccacgttgaactatccattccgatcggctgagaaagatctataaaaatatgaaaaagcccgaggcttcgttttgaagctcgggtttgttttttattgatattgttcaagtttggagaaaaattgaatgacgaaatgatagaaatcatttgcagacggagccagttcccttccttttggtttaataatacctacggtacgcttcacttgaggaaattcaatcggaattttgaccgtgaaccggggtgtggtttctgcaaaggtgctttcaggtaataaagtaactcccatccccgcggagactaatcctttaatggcatctaaatcctcgccttccgtcgatacaagcggcgcaaagccggcctgtctgcaagcgtcaatcgccatgttacggagaataaacccttcaggaaataaaacaaattggtcgccgcgcagatcaattaaatgaatatttttctgtttggcaagcgggtggtgcagcggaacaagcgcgtaaatcttttccgtgaataagatattgcctgttatgtcggggaattccgtcggaacggggccgagcagcgccgcatctatatccctgtttcttacggcttcaattaaaaacttataagacccctggcggagcaaaaactcaacgttcgggtattcctctttaaatgccgaaatcaccgtcggcaaaagctggcttgcaaggctcgtcggaaatcctattttgacggttccgcgattcggatcaaggtattcatcaatttgttccttcgcgtaatcaattgctttcatcgctgttttaacatgttctaaaaattgtttgccgatcggcgttaatttaatatttctgccttcccgttcaaataaagtgactttcagctcttcttcaagatttgcaatctgcctgctgatggcggattgtgcgacatgcagatgatcagccgcttctgacacatgttcccgttctgctacttccataaaataccgaagctggcgtaattccattgtgttcacacctatctatctcattttgagatgtatttgatctaaattatatattgtttatattgttttgaaaacttacaattaatttaaagttgtcagattttatgaccgataattaacggaaactgatcgggggagaggaattatgacttacaatcaaatgccgaaagcacaaggtctctaccgtccggaatttgagcacgatgcatgcggaatcggcttgtatgcccatttaaaagggaaaccttcacatgacattgtcaaaaaaggactgaagatgctttgccagctggatcacagaggaggacagggcagtgatccgaatacgggtgacggcgccggcctgatggttcagatccctgatgctttttttaagaaagagtgcggagaaatgagactgccggaaaaaggccgttacggggtaggaatggtctttttctcgcaaaatgaagaggaaagaaaaaagatcgaaaaacaggtgaatacattcattgagcaggaaggacagatcgttcttggctggagaaccgtccctgtaaatgtcggaaaaatcggaacagtggcacaaagcacttgcccgtatgtgcgtcaagtattcatcggcgccgcaaacgatttgaaagacagccttgcttttgaacgcaaactgtatgtcatccggaagcaggcggaaaattggggctttcaagaacagcttgatttttacttcgcaagcttgtcaagccagactattgtttataaagggttgttaacgcctgagcaagttgacgctttttatttggatttgcaggatgaaaccttcgtatctgcattttcactcgtgcattcaagattcagcacaaatacctttcctacttgggaacgtgcccatccgaaccgctatctgatccataacggagaaatcaatacgctccggggcaacatcaattggatgagagcgagggagcagcagttcgtttcagaaagcttcggagacgatcttcacaaagtgctgccgattttaaatgctgagggcagtgactcatccattcttgataatgcgtttgaatttttcgtgatggcggggcggaaaccggcacatacggcaatgatgctgattccggaaccatggacggaaaacactcacatgtctaaagagaaacgggctttttatgaatatcacagctctttaatggagccgtgggacgggccgaccgccatttcgtttacggacggaaaacagatcggcgccatccttgaccgtaacggcctgcgtccggcacgttactatgtgacaaaagatgaccatattattttctcatccgaggccggcgttattgaagttgagcaggagaacattcttcataaaaaacgtctgaagcccggaaaaatgctgctcattgacttagaggaaggccggattatttcagatgaagaagtaaaaacagaaatcgccaatgaattcccgtatcaaaaatggcttgaagaagaattggttcaagtgaatcctgacccggaaatccgggaagaggaacaattcgatgatcttctcgtccgtcaaaaagcgtttggctatacgtatgaagatatccagaagtatttaattcctgttattaaagaaggcaaggacccgctcggctctatgggaaatgattcgccgctcgccgttttatccgatcgcgcccaatcactgtttcattactttaaacagctgtttgctcaagtcacaaacccgccgattgacgcgatccgcgagcagcttgtgacctccacggtgacatggctcggagctgaaggcgatctgctgcatccaagtgaaagaaatgcccgccgcattaaactgtatactcctgtattatcaaacgaacagttttatgcgctgaaaacacttgtgcaccctgacattaagagccagaacatccgcgcgctgttttccgatgacctggaaaaaggcctgaaggatttgtttcagcaggcggaaaaagcgatcaaggaaggcgtatctctgttaattttatctgacagggcaatgagtaaggaattgacgccgattccgccgctcttggccgtcagtgcgatgcatcagcatttgatccgccaaggcctgcgaacaaaagcaagcattatcgttgaatccggggaagcgcgtgaagttcatcactttgcggctctcatcgggtatggtgccgatgctgtcaatccgtatttgacttacgctacgtataagcaggaaatcgatgaaggccggcttgatattccgtatgaagaagctgtcagcaaatacggaaagagcgtaacagaaggcgtcgtgaaagtgatgtcaaaaatggggatttcaactgtgcaaagttacaggggcgcccaaatttttgaagcggtcggcatcggtgaagacgttatcgccaaatactttaccggtactgcatctcagcttggcggaatcgatatcgaaacgattgcgcaagaagcgaaacagcgccatcaagcggcgtacaaggatgattacagccaaactcttgatccgggaagtgaattccaatggcggaacgggggagagcaccacgctttcaatccgaaaaccatccataccctgcaatgggcgtgccgcaagaatgattacagcctgtttaagcagtattctcatgcagcggatgaagaacgaatcggatttttacgcaatctgttcgccttcaaagaagaccgcaagcctttaaaattagaggaagttgaatcagctgcgtccatcgtgaaacgttttaaaacaggagcgatgtcattcggttcattaagcaaggaagcccatgaggctttagcgatagcgatgaacaggcttggcggaaaaagcaacagcggagaaggcggcgaggacccgaaacgtttcgttccggatgaaaatggcgacgacagaagaagtgcgattaaacagatcgcttccggccgtttcggcgtaaagagccattatctcgtcaatgcggatgaattgcagatcaaaatggcgcaaggggcgaagccgggagaaggcggtcagcttccgggcaacaaagtatatccttgggtcgcggatgtccgcggttctacaccaggtgtagggctgatctcaccgcctcctcaccatgatatttattcaattgaagacttggcgcagctgattcatgatttgaaaaatgcaaatcgaagcgcgcgtatcagcgtcaagctcgtgtcaaaagccggtgtcggcacgattgcggccggtgtggcaaaaggcacggcggatgtcatcgtcatcagcggctacgatggcggaacgggcgcgtcgccgaaaacaagtattaaacatacgggtcttccgtgggagcttggtcttgcagaggctcaccaaacgctgatgctaaacggtttacgggatcgcgtggtattggaaacggacggtaagctgatgacaggccgagatgtcgtaatggccgccttgctcggtgcggaggaattcggctttgctacagcgccgcttgtcgttctcggctgcgttatgatgcgcgcctgccacttagatacatgtcctgtaggtgtcgcgacgcaaaacccggagctccgcaaaaaattcatgggcgaccctgaccatatcgtaaattacatgctgtttgtcgcagaagaagtgcgtgaatatatggcagagttaggctttaagacgcttgatgaaatgatcggacggacagacgttcttcatgtcagtgaacgtgcgaaagcgcattggaaagcgggccagcttgatttatccacactgctgtaccagcctgaaggcgtacgcactttccgtacggcgcaaaaccataaaatcgacgagtcgcttgatatgacggttattcttccggcggtgcaggctgcaattgaagccggtcaggaagcggaagctgaaatcaagattaataatacaaatcgcgtagccggaaccgtgacgggaagtgaaatttctaaacgctacggagcggaaggcctgccggatgatacgatcagacttcattttaccggatcagccggacagagtttcggggcatttgttcctaaggggatgacgcttcatttgaacggggattcaaatgactacgtaggcaaagggctttcaggcggaaaaatcatcgtgaaagcgcctgatgacttcaattgtgaaactcacgataacgttattatcgggaacgtcgcattttacggagcaacaagcggggaagcgtacattaacgggcgcgccggtgaacgttttgcagtccgtaacagcggagtcaatgtcgttgtagaaggtatcggagaccacggctgtgaatacatgacaggcggccgggttgtcgtcctcggcgaagtcggcaaaaacttcggggcgggaatgtcaggcggtatcgcatacgtcctgagtgatgatgccaaagcatttaaacgcaaatgcaatatggaaatgatttcatttgaaaagctgacggatgaggcggagatcaaagaagtacaagaaatggtcaaacggcatgcagcgctgacaaacagcaaaaaagccgcagatctcctggacaattgggaaaaagccgcagaaacctttatcaaagtcattccgaaaaactataaacaaatgctcctcagcatcgaagaacaaaaagcggcgggtttatcagaagaagacgcaattatgtatgcttttgaagccaatacaaaggttcaccaaacgcctgccaaagatcaaaaacaagcggtagtacagtaagaaaggggagaggaacatggggaaaccaactggattcatggaagaaaaacgagaaaaaccggctgagcgggaccctctcactcgcttaaaggattggaaagagtattcggctccattttcagatgaagcgtcaaagcggcagggggcgcggtgtatggattgcggcacaccgttttgccaaatcggcgctgatatcaacggttttacgtccggctgcccgatttataatctgataccggagtggaatgacctcgtctatcgggggcgctggaaagaagccttggagcgccttctgaaaacgaataactttcctgaattcacagggcgggtctgtcccgctccttgtgaaggatcttgtacgctggctatttcagatccggctgtttcaattaaaaacatcgagcggacgatcattgacaaaggttttgagaacggatggattcagccgagaattcccgcgaaacgcacaggtaaaaaagtcgctgtcgtcggttcaggcccggcaggtctggcaagcgctgatcagctgaatcaagccggtcattccgtaacagtctatgagcgtgccgacagagccggcggcctgctgatgtacggcattccgagcatgaagcttgagaaaaatgtcgtcgaacgccgtattaagcttttgacgcaggaaggtatagattttgtaacaaataccgaaatcggcgttgacataacagctgatgagctgaaagaacaatttgatgccgtcattttgtgcacaggcgcccaaaagcagcgcaatctgctgattgaaggccgggaagcaaaaggcgtccattatgcgatggactatttaacactggcgacgaaaagctatttagattccaacttcaaagacaaacaatttatagacgctaaagggaaagacgtcatcgtgatcggcggaggagacacaggagctgactgcgtggcaaccgcgctgcgccaaaaagcgcgcagtgtgcaccagttcgggaaacatcctaaacttcctcagacgcgcacgaacgacaatatgtggcctgaacagccgcacgtctttacccttgaatacgcctatgaagaagcgcaggcaaagttcggcaaagacccgagagaatattcaattcagacgacaaaaatggtggccgataagcagggccgcttacaagagattcacaccattcaaatggaaaaagtcagaaacgaattcggaaagtatgaatttcatgaactgcccgggacagaaaaagtatggcctgctcagctggtgttcatcgccatcggttttgaagggacagaacagccattattgaaacagttcggtgtcgattcggcaaatcataaaattcaggcggcatatggggattataaaacgaatgttgacggtgttttcgccgcaggggatgcgagaaggggccaaagcctgattgtatgggcgattaatgaaggccgggaagcagcgcgcgaagtcgacagttatttaatggggagcactgttttaccgtaaataaaggggtttatttataaaaccggctgggatcagccggtttttcgtattgaaatgagtatataaggataacgtggaaaggaagataacatatggaattttgtttatcagagtggagagattgttttctcccgcagactgagacgatttgcaagccttgagcagtcgatcacggtgctgctgacgggctctgtgtgtctgcagtcgatttgcgggcagattttaattgatgaagaaaaacatattgaatttcaagcagaaacgcttataaacaaataagggaacggacgggtccgctcctccttttttagacatctatacgaaagccgatattgccgaactgccgtccttcccgcattctgttaaaagcggcagctgcttcactgagagggtacatgcggtcgataatgggacggatgccgcagcggtttatcaattccagcatatccgcgaattcctcattgcttcccattgatgtaccgagaatatgaatctgcggaaaaaacagcgagcgaataggaaatccgagctgatcgcctgaactggcgccgaatgttacgatccggccattcggtttaataatgtcaagatagtgttgaaacaaggcggggcctacaccgtcaagtatgatatctgctttttcgccattcagtgcctcattccaatcaccgtagctgtcaatcgcccggtctgcaccgtatgacagtgcggtttgttttttgttttcactgcgggaggtgacgctgactgtcgctccgatagcttttgccattaataaggcgtaagttgccacgccgcttccgatgcccggaaggataaggtgttcgcctttttttaattgtccttttgtaaataaggcgcgataagcggttaatgctgataacggcagcacgcccgcttcctcccaagtcaggtgttcgggttttaaaacggcgttttccgcaggaacgatgacataaggtgaaaatgttccgtcgctcggaccgcctaaaatatcagggacggctggtacgtcctcaacagtcttccaattcagcaccgggttgatgatgacttctgcatgcagtaaatgagaccggacgccgtgtcctatttcggttacgatccccgcgccgtctgaaccgagagtaaattcatggtttccggtttcgtggtttttcattaaaaacaaatcacgatggtttaatccggctgttttcagcttgatttttacttcgccgtttcctggccttttgtcaggtgcctgcctgaaatcaaagccattttcgtgtatgataagggcattcattattcttctctcctttatgattgatgagaaagattttacaggctgtatcagctgcagtaaataaatgaaaattgatagccggctatcaataaaaatcatagcaagaaggtgcccttacatggaaagcggagacttaaagatttttcaggctgtcgcccgcaaaggaagtatttcaaaggcggcagaaagcctgcattatgttcaatcaaatgtgacaaaccggattcagcagctggaacggcaattgcaaacacagcttttttaccgcacaaatcgggggatgacgctgacgcccgcaggtgaaaacttattgaaagacgcagacagaatccttcaattgctgcatgaggcgcaaaaaacggcgcaagaggcaggcgatccgaacggcccgcttcgaatcggttctcttgaaacggcggcagccgtccatctccctcaatttttcacagactattacagccgttacccgaaagtacagctgtctctgtcaacgggtgatacacataccttagtgcagcgcgtcttacattatgagctggacggcgcttttgtttatggtccggtcgaatacgaagatcttgagcaagtcgctgtatttcaagaagaattggtcttggtttcaaataagcgggaaggcagtttgcaagacttgttgcgagatccgattctgtattttgccgcgggctgttcgcaccgccgcaaaataaaaaacatactgaaagaagaggcaatgcccgcacataaaatcattgaattcggtacgttggaagccattattggggcggtgcaggcggggatgggggtttcctttctgcctgcatcagccgtccgttattttcaaaacaggaaaaatctttttcttcatgagcttcctgaacagtttcgggatatgaatatatcattcatctaccggagtgatttatttttgacatcggcgtttgaagaactgctaaatggattaaaagcattaccgaacggaagatgagaaaacaggacagctgtgtacgccaatttttttcgttctggtttttcttaaaaaaactttctttttcggaaaatttatgtataataaaagaaagtttttcggataaagtatctgcaatgataaggacatgagacattttaaccggccatacagagagggaaggcacggctgagaccttcccggcacgaagaatgagcttaccgccttttgagctgtatcggtgaacgaaagcagccg

SEQ ID NO: 28 - DNA, 148565 bp, Bacillus amyloliquefaciens
gacagcggcagcgggttgcgctcggccggtcgatcgtgcgggagccgaaagtgtttctgatggacgagccgctttccaacttagatgcgaaattgcgagtgacgatgcgcgcggaaatcagcaagctccatcagcgtttgaaagcgaccatcgtttatgtgacgcatgatcagacggaagcgatgacaatgggcgaccggattgtcgtgatgaatgaaggagatattcagcaggccgcaagcccccatgagatttatcattatccggcgaatatgtttgtggcgggttttatcggttctccgagtatgaattttataaaaggcgtcattgaagaaagtcacgggcaatggtattttgccggttcgtccgttcgtctgcccattccgaaagaaaaagcggccgttcttgtgcagaaaggatacagcggtaaggagatgattgcggggctgcgtccggagcatttgacgcttgccggacaatcagagcacccgcctgaagcggcgtgccgcgctgtggcggaagtatgtgaaaacttaggcgcggagatgtacgttcatgcggtgagcggagatgaccgcatgacgatccgtcttgacggcgcctcacaggtgaaacccggcgatgccattctgcttgcggtcaatatgaaccgggccgtcttttttgatgccgacactgaaaacgccgtatattgaaaaagggagcctgatgatcagggctcccttatcacttcttatgatacgattaccagatttcgtccgcccattccggatggtcgataaacggattgcggttatgctgatagtcttcgtaaatgatttcgttccgccgtttttccttactgtcgacggggtcttgttgattccatttgagcaaaacggacagttttcccatgtaaggagctgagccgtttccggttttatcattcagctcaaggtcgggatacccgtcttctccttcataacgcaccgccatgtaaaacagcatacgggcgacgtctcctttaacttcatcgcgcggctcccaggaatcaccgtcgtaataattgcccggcgctttcgggtattctgagccgccgttatcaaaatccatgtttcctctggcactgttcacctggacgtctgcagggcgcagatgatgaatgtccgtcccggggccggcagctgttccgaagtttccgtgtgactttgcccacacgtgttcgcggttccagtccccgacgctgccgccgtttttacttttggcccgtgattcctgggtgtagagcaagatgacattgttcggatttgccggatcttcgtcagtttccttcaatgcattccatacttggctgtaagacagctttgtatgtccgctgatgatgcggtgcagggcgctctttaaggctgttccgctttttccggaagcttctttgtaatatgtgtccgtatccgcagacggagtgatgacagctgaggcagtttgcggaaaaagagttgtgccgccggcagttgaaaccgccatccggctgtacagattcgtgtcagccggcgcgcccgcagaggctgacggcgcggcccatccaaaaatgaaaaacaggcagacaatcggcagaaaccaaagtttttttgtcatgacttgccctcctttacctctattatccaaaaaataaatctaatattctatcttttttgaaaaatagttccttcggcttattggtcaaagtatccggaaaatcattgattttttggaagatatgataatgaactcgttatgcgctccttctataatgaagatcatcttgtcagttttttcagtttaaaaggagggcgtgtatggaacatcagcagctttcggcggcgaatattgagatttccgatgacatacaatggctgtctcaattcggcgcttccgcttccggcggagtgacgaggcttttatatacgaaagaatggatggacgcccagcttgccgtcaaaaagaaaatggaggcgttcgggctggaaacggcatttgacgatgtcggtaacgtgttcggccggctgaacggcacagaatcgcctgatgaggtgattctgaccggatcgcatattgacaccgttattgacggcggaaaatatgacggtgcgttcggcgtgctggcgggcatgctggcgatccggcacttgcatgagacgtgcgggcgtccgaaaaaaacgctggaggctgtgtcgctctgtgaagaggaagggagccgttttcccatcacctattggggctcaggcaatatcaccggtgctttctcgctttcagatgcggaaacaccgacagacgcgtccggcatttctctgagagaagccatgcggcagaacggcttcggtgcaggccgttatccagcgccgctgcgcactgatattagtgcctttctggaaattcatattgaacaggggcaaacgcttgaacgatcaggaaaggatatcgggattgtcaccgagattgccggacagagacgctataccgttacgcttgacggtgaatgcaaccatgccggcaccacttcaatgaaatggcggaaagacccgctcgcggcgggaagcagcatcatccacgaactgatgctttcagcggaaagacagccggaagagctccgtctgacgtgcgggaaaatgacggttgaaccgaatatggcgaatgtcattccgggccgtatccagttttccgttgatattcgccaccggcaggaagacgtgctggcagccttccatcagaaactggtatcgattgttgaatacatcagccgaggcaaaggagtcagaccctttattgatgaatatatgaggatagagccggttcaaatggatcagacactgacacgaaccgcagcagaggctgcaaaagagcagggggcggacccggagaagatcgtaagcggagcgggacatgacgcccagatgctcggcagaacctttccggcctgcatgctgtttgtgccgagccgtggcgggatcagccactcaccgcttgaattcacacccgcacatcagcttgaaaccggcgtccttacgctggcgaatgtattacataaacttgcctattaacgtaaagggggaatcggcgtggagacaagaaaagaattgtgcattccgcaaagaacgattatgacaccgggaccgacagaagctgaaccgagggtgctgagggcgatgggcgctccgatcatcggccagtttgacccggcatttaccggcattatgaacgaaacgatgcaaatgctccgtgaattgtttcaaacggaaaaccgctgggcctatccgattgacggcacatcaagagcggggattgaggctgttctcgcaagtgtgatagaaccgggcgacagcgtgctcattccgatatacggacgcttcggatacctgctgactgaaatcgccgagcgatacggagcggacgttcatacgatcgagtgtgaatggggaacggtcttccggcctgaagaggttatcagcgagatgaaaaagatttctccgaaaatcgtcgctatggtgcacggagaaacatcaacggggcggattcacccgctgaaagaaatcggggaagcgtgccgcgcccaagacgcactctttatcgtggatgccgtggccacgatcggaggctgcgccgtaaaaacggatgagtggaagattgacgcagtcatcgggggaacgcaaaaatgcctgtcggtcccttccggaatggcgccgattacttataatgacaggacggccgctgtcattgccgcgcgtaaaaaggtagaacggggcattgcgacggcggctgacggcaacatgctgtccggtcatcgcccgattacgagcaactattttgatctgagccagctcgaagattattggagtgaaagaaggctgaatcaccatacagaagcgacagcaatgctttatgcgctgcgggagggtgtgcgtcttgtcttggaagaaggacttgaagaacggttccgcaggcatcagcgtcatgaaaaagcgcttacggcgggacttgcagcgatgggccttaatttattcggcgatccgggggcgaagctgcctgtcgtcacatgtgtgaagattccgccggaagcagacggcgaatcgatcagaaggatgcttttgtctcaattcggaattgaaatcgccagctcgttcggtccgctgcaggggaaaatttggcgaatcggaacgatgggctacagctgcagaaaggaaaatgtgctgtttgtgctggccggacttgaagcggttctgatcagacacggagttgccgttaaagccggggaagcgctgcaggcggcccttaacatatatgatctgccggctgaaaccggtgtgctgtcatgagacttgaaaacgagattgaaatcatctggacttttttcccttttgcccgttatactgaatggtataaaaaatgacaaatatggaatgatcatctgtttgtctggggagaaggtaagaaatcatggcgtacataggccgattgtcaattttaatgctgaatatgtttattgcgatgcttggaatcggattgattattccgattatgcccacctatattaccgaattcggcgcgacggggagcacgatgggtctgcttgttgcggcggcggggcttacacagcttttattcgcgcctattgccggggaaataaccgacaaatacggacggcggaaactgattattttcggcatcgccgcctttgccgtgtcacaattgatcttcgcctttgccggaagcctctggcaattgttcgcatcccgccttttgggcggaatgggcgcggcgtttttaatgccgtcaatgttcgcttacattgcggatattacgaccgaagaagaacgcgggaaaggaatggggctgttcagcgcggcgatgacgctcggtgtcgtcatcgggcccggtgtgggaggctatttggttcattacggcatgtctgtgccgttcatcgtgtctgcaagtctcgcctgcttttcaagtgtgctttcatttttctttctgcccgaaacgctgggacgtgaaaagcagctggaagcccgggcaaaaacggaaaaacgtgagcatctgtttaagcaaatgtcacgcgcgctcaagtcgccgttcgcgtttatgctgattctggtttttgtgctgaacttcggaattatgaactttgaatccgttttcggcctttacgttgaccataaacacggatttaaagcgtctgatattgcctttattattacggctgcgggtctcatcggcgtgtttgtgcaggcggtcggcgtcagttatctcgtccgcaagttcggggaaaaacgcgtgattaacgtgacgttgatcggggctgctgcaggacttgtgtggtgccggtttgcgggttcatattgggccgtttttgccgcggcaatctttttcctgacgctgacatcgctgctccggccggcggttaatacgatgctgtcgaagctcgccggtgaccagcaggggtttgccggcgggatgaacacctcattcatcagcttagcgaatatcgccggaccgtctgctgccggttttctctttgatgtaaatatggaatttccatatatgctgggagcggtcattctcgccatcagttttctggccgcgcttggctggggcaaaaagacacaaacccggccgttcacgcagcaaggataagaatcaaaagcctccgggtatccggaggctttttgctattgtcgtttattcttcggctgtctgcatctctgaaattgcagagatgcgcatagagggaaaatcatatcgaacgccattatgaattatagggaaatcagttgttccgtatgctcaagcatagcgcgaatggaaaccggaacaggtgtagataaagtaaaaccagctttatctcttgaggagtctgacaaatttgatctgccggaagttgatcaaaaaagaaggcagtcaggcgggaacaacatagatcgacgtaaatgaagaaagggaaaaagcagcggtgttggtatttgctgtttcgtatgcagagtgagaacagtctgcctaaacgggtcattgggataataagaaccgttcaccgggtgtaggggttgattggtgacaacaaggagaggttagcttataaaacctctcacggaagatgttgtgatggctcccctgcacggattttgcaggctaaaacccgcaattaggccaacacacaattatgcaagagacaatcatctaaaaagggtgtcggtaagtacaatatggtgtacggaaaaggagttgaaaatgttgtattattacccgtcattccatttgtatcagcggcaagaatttaattattatccatgggcccatcaattgactcattcagggagctccccctatgtttccgcgcgccctcctttttataattctccatgttacagagagtgcataagaagcggagcggatagttatttctgctgctatatctgcggtttctgttaaaaagaaagacttatagaagtaagtgatttttccaggatgacagtgagaccatcatccagacagccagtagccaacacacgaagcttcattacgattcacggaggggaaccgtccctcctttttggagagtttttttccgctgtgaacggagaatgtatcagtgtagccaaaactccgcgtgaaaaaggaaaagagcacttcctctttcctttaggagaaagtcatttctacgtatcaaaatttaaactatgagattggagagagtggcctgcttaaagtgtttacgactgttgttaacgatccatgttggggataggctgcggcagaagctctattaaatatacaataatagggtaagcacccgtaaacgggatgcttttttgtttggaggttaaaatatgataataaaatccattcccgttgaggtcagggatcaaagctgacagagacctctaaaacatataggcgatgggtgaagcggcgcccgtcagatatcactataggagatataacgaaaaggacagaggggaaagaaagtcatttcaatactgtcctggtcaaaaacagtcttgtgcgcctactttggccagtaactctgttttcatacgttatgaaccttactatatctctgaacgggatatcatcttaatgcagtcgttcccattggattatgatttcatggacgctaacaaacagtattgtttgtggaatgagcgtcccacctatcatgatgaagaggattgcggaacagatttatttgcaatggctaaaaattgtatagaacttctgttctttaagtgactgattttaatctaatgtagatcagttgatattaaaggagagtagctaatatgagatataaaatagatattgtaattgataccgtttcacaggtttataatgaagttcttcagaccttagcaactcatcatactattagagatctattaaattatattgaagatgtcggttcagtccttgagggatttttaaaggaatctatttacaaaagtgagaaaaatagggaaaattttttcagcctcattaatggtctttcaaaatttgggctatctgaggatttaaaaacatcactacatgaattaagaaaactatacaataatgctaaacatagtccaacatataagacctctacagataaaatactagaaatactaaaagaaacgataagttgtttaaaagaaattaaagaaaaaaacttagggtttgatcctatagtaaacacatatagaaggacagtatggatcgctggttgggatcactatacaacaggtgatacagaagttcacattatgattccttacgatggtgatagatatattccttcaattgattacttcaatattacatggtcaggatgggatgaaataataaataagtttgtgtcaactgaagaattacttatgggaaaagaatatttcccaagaaaagtatattcagatttggagtcagaaagagactttgtagatgcaggtgtctttaagggcgattataaaaccttggttttagaattatctaaatatgttgatgaaaaaaatgaaaagtctcttctacctttttttcaaagagggaataatcccagggctatgttttatggagtcatttatgcagtttgtgaggctattaatgaaaaaggattccgaagaaacaatattgaagaattccgaaaatcagtacaacttttggctagttataaatatgcttgtccgagaaattcagaaattgttcaaaaatatataatttctgtagctgattttctaatggggttaaatgatgaacacacaaaaagaatagaaggaccactattctttacacagaggaggtttgaaatgcagaaaaacgctgcatatctaaaaagtaaagagcttccacttatcattactaatcaaggtgaatttattgttgaaataatttagtggataaaaagaggatgctgctaacacccttcattcacaacagagaaagctccctgtcatgatcacgctctgattcatattgtaatagaggacagggagcatgacaagagaaaaagcgaacataagttactatcctgatgacgaaaaagaaaatctccttctcctgcatagtgccgatttgttagagaacatcagtcaatctaaagagaaatatcaaaaaatcgttcagaaaggtatcgcctagtgagtaaaagacttccaaagtggccatatcaaggtgaataatatggacgatttaataaagctcatagagctcgatatagagcttcagaaagatgaggaaatttgattatctatgtgaatgagacgaatatccgtaatcaattactattctattagggttgacatttgcggcttccaattggccattaaatcatagaggactctaactttgctacctccatagcaggatttcgaatataaactctttgtgaattttcaaatatgccttctattgaagcattaataaaggaatcgggtatgaatgtcggcctaaattctggatattcaggataatcattaggttggttttgagaatagtaacggtaatcacatggaattggaacaagttgatattgtgggtaataataatacactttaaatcaatctccttcaaagttaatttacaaaatatgtatgtgaaggacgttctcctactcggaacaggagaaaatactcattttgaaatcaaagaaacatccgaacttttacaaggaagtaaagatccttgtgaaagaagcagacgagcaaaaacttgttaacggtatcgtttatgagccggacacagttgatgctcacggggatgttatgacagctgcagaaattgagaaggtccgctcacggcttcctgatagatgctcgtgaaattgacaagcagcatgactttcagggcggcgttggtgaagtggttgagtcttgtatcgccccccgctgattttcaaataaatggcgaaaccatcaaaaaagggtcatgggtgcttgtgacaaaggctcccgaggcagtttaggatgacatttaaaagggtgagattatcggttgcatcccggatatcgaaaaagcctgatgatatcaatggaagctgattttgacggcagcattttttgaggatttagctgaatgaatcccccttaaataggatgcgggagaacacccgcatccctatctctaacgattccttaaccaatcagccgctgcattctcagcgcgagccgcaggcgcatcgtcgtctccggatcttttaagcttttgccgagcagttcctcgcatttttctaaacgatagatcaccgtatttcgatggacgtacaggcgcttagccgtttctgaaatctggcagtgggtctccaggtaaacagacagcgtatgaagcaggctctggtcctccttttgccggtcggccaggctttgtagggtggcttcgtaaaacttcttcacatcttccgccggaagcaggcggagcagctccggcacgtctttggcatgatagatttgaataaactccgcgcttctggacaaatgcccggatgaaatggcgtctgaagcttcggtaaaagcgtcagggacgtcgatcagcttttggcatatgtttgagatgccgaaggagacagtccgtttaaactgcgcccggacctgcttttgaaactgctccaaaaagctgatgacagacgcgtgcatttcattccagctgtctgtcgcttcaattaaaagaataccgacatttcctttaataaagagatgagggggaaacggaaaggatgacagctccccttcaagcagatcaaatacatgatcagaaacgagctgattttcggtaaagctgatcgttttctcatttcggtcaagttttccgcaaatgcacatgtatttttgatcccagcggagccggaattctttggcgcggcttttgatttcttcatggccggtaaacgagcggtcgatgaaattgctgaaaaattcattgcgcgcccgtctaccgaattgtttgacggcattttctttcagcagttcaaaggaaatgacgttggccgcctgttcaattgtcaaaatcatgcctttatcagcggtctgcaccagctccggaatcaccagataaccgcagtttttttcaacattcagaatcggcaggacagaatacgcctttctgtcggacagcatggaaaagcaggtgaaataaggcccggaaagggaataacagatgtttttcaatacagacgtgtcaatgggtatgcggtgggacgatgataagagttttgtatgctgatccaaaagcagcacgggaagccggagaatgtctgagagcttcttaagcagggattgaagccccttgccgctcatgatgtggtttgtgaattttttatgggcgtaaatggcctgctgcagctcatttgaacgcatatcaagaatatggctcagtgtggcgttgacgatatctcccagccggatgtcttccggcagctcaataatcggaaattcataccggtcggcaagctccgcggcatctttcggaatgacattaagatagcgcttcgttttgatccccagtcctgcgcagccccgttttgccatgaggcggatcaaatctttcaacagctgcgggcggtccttcaagtggtaagccgtcgtgacgagcaattcgtttttatgtaaaaaatcagcgatgtccggcgcatccatcatgttgacgtgctgcacctccctccagccgccggatttgcctgcgattattgcggcccgctcataagcgggaatcttcatcacatcataaatgttcatcagtcaatctcctttcaggttctaaagacaaccattggttaatatgaataaaaatcatcaaaaattatagcggttttgctgatgtattacgatcatagtagcagtaaactggcaatcatagacgcatgttgtgataaaaactgacagaaaatcgtcatccttacagggaggaagataaaatggcctatgacgtaattgtaaagggtgcgaaagctgtgcgaaaaggcgggacagagcgggccgatatcgccgtcaaggacgggaaaattgccttgatcgggcccggcattgacgaaaacgcggaacaagtggtgcaggctgacggcatgtatgtgtttccgggcgcggtcgattgtcacgtgcatttcaatgaacccggtcgcgaagaatgggaaggcattgaaaccggctcaaacatgctggctgccggcggctgtacgtcttattttgatatgccgcttaactgcatcccttcgacggtaactgctgaaaacctgctggcaaaggcggaaatcgccgaacggaagtcagcggttgattttgcgctttggggcggtttgatgcctggatataccgaacatatccggccgatggcagaagcgggggcaatcgggtttaaagcgtttctgtctaaatcgggaacggatgaatttcaatcagccgatgaacggactcttttaaagggaatgaaggaaatcgcggcgtgcggcaagattttggccctgcacgcagaaagcgacgccctcacccgattccttgaagccgagtacgcgctccaagggaaaattgatgcccgcgcttacgcttcctcccgtccggaagaagccgaatgcgaggctgtgcagcgggcgattgaatatgcgagagcgacgggatgcgcgcttcattttgtacatatcagcacgaaacgggccgtgctctccattcagcaggcgaaaaaagacgggttggatgtcaccgttgaaacgtgtccccactacttattattcagctttgaagacttcctcaaaaaaggggcggccgccaaatgcgctccgccgctccgttcagaggctgataaagaggaattgatcggagttttggctgagggccagattgatatggtgtcttcggatcattctccctgtcatccgtctttgaaacgcgaggataatatgtttctgtcgtggggcgggatcagcggaggccaatttacgcttctcggcatgattcaattagcgatcgatcatgggattccgtttgaacatgtggcccgatggacggccgaagcaccggccgagcgcttcggtttaacgaataaaggacggcttgaagagggatttgacgctgattttgccattgtccggccggaaccttttaccgtcacaaaagaaacgatgttttccaaacataagcaaagcctgtatgaaggccgcacctttccataccgaattgctgcgacctacagcaaggggcgctgtgtgtaccaggatggcgtgggtaagcagagcggggctttcggaacattcctgaagccttctgaaataaaagaaccgattctctgaggagaatcggctttttttgtcgtttggaaagcgggtctcgtggtatctttttataaaaaggagtaaaacacattgtataatcaaatcttgaacatattaacggcatcctggtcgcgcaagactagtacaaaatggacggaagattgcccggccaaaggccagtgcggcgtaacggctttagtcatccaagatgtttacggcggtgacattctcaaaacaaaaaccggcacaagctggcatttttataaccgaatagacggggagatatatgatttcacgagcggtcagttttcagagccgattgtctatcagcacattctttcttccagagatgaggcattttcggacaccaatgaacatcagtaccggttcctgaaaagtgcattcagaaaaaacatggaaacagaaagagaaaaacacctgtgataaactagagtgagaggtgaaggattgtgatttatatcggactgacggggtggggggatcatgacagcatctatccgccgaaaacagcgggcccgcaaaaactgcaggtgtattcctcccattttcccatcgttgagctggacgcgagcttttacgcgatacagcccgcccgtaataatgaaagatgggtcaaagagacgccggaatcttttcaatttgtcattaaggcatatcaaggaatgacgggccatcagcgcggcgatattccctttgaatcgaaggaagaaatgtttgaggcgtttaagctgtcattatcgccgtatatagagcatggaaagcttgccatggtgctgttccaattcccgccgtggtttgactgcaagaaagaaaacgtcgcatatttaagatggtgcaggcagcagatgggcgatattccgtgcgcgcttgaattccgcaaccggtcgtggttttccccgccattttatgaacagacgctttcctttatgaaggaggaaggctggattcacagcatatgtgacgagccgcaaatcggcgagggcagcattccgaccgtcctgaaagcaacggatgaagaaaaaacgcttgtccgttttcacgggcggaacaagcagggctggatcaaaccagacggcggacaaaactggcgtgaggtcagatatttataccgctataacaaacaggagctcaaagattggaaaaacaatcttcaggagctgaaaaagcagtcgcgcaatctgtatgtgctcttcaacaataactcaggcggagacgccgccgataacgggcttgagatgcttgaaatgttagatatctcatataccgggcttgctccgaagcagctcgacctattcagctagaaaagaggtttcaagacacatgtcttatcttattttgatcatattgggatttatcgcgggaacggtcggcagcctgatcgggcttgggggaggaattatcatcgtgccggcgatgctctatttaagcacgatgactccgttttttcatgacgtaacaccgcagactgccatcggcacgtcccttttggtgattatttttacgggactgtcatcaactctggcctatatgaaatataaaaccgttgactacaaaagcggactgatcttttttatcggttccggcccgggaagcatcatcggcgcgtatttgtctaaactttttaatgcgcatacgttttccgtctggttcggattttttatgattttgatttccattacattaatgctgaaggcgaaagcaaaaccggtcaataaagcgcataaaggcatgatccggacatatgaggatgaatcaggtgagctttatacatattcgtaccgtattttcaccggtatcgtgattgcctttttcgtcggtttattgggcggtcttttcggcattggcggcggctctcttatggttccggccatgatgctgttatttttgttcccgccgaaagtggctgtggcgacgtcaatgctcattattttcttatcctccgtgacgggttccgtgtcacatatcgcagagggccatgtcaattggctgtatgcgctgtgcctcgttccgggcgcgtggttcggcggcaaaatgggcgcgtgggtcaataagcgggtgcagacgaaaacgatcgtgcttttcatgcgggtcgtcttgattttgatcggctgtgaattaatttatcaagggatattcagctaaaaggtaggagagatggtatgttagagaagctccgtttatatcatacgaatgatttgcacagccatttcgaaaattggccgaaaatcgtacattatattgagcagaagagaagtgagcatgaaaaaaacggggaggaaacactcgtatttgacatcggcgatcatatggaccgattccaaatgataacggaagcgaccttcggcaaagcgaatgtcggcttgttaaaccggcttgagatcgatgcggctgccgtcgggaataatgaaggaattacgctgcctcacgatgagctggcggatttatatacccatgccgcgtttcccgtcattgtgtccaacctgtttgacgcggacggacagcggccggaatgggccgagccctacgtgattaaaacgctgaaaaacgggatgaccgccggcatactcggcgtcacggtgccgtattatcccgtctatcaaaaactcggctggacggtgacggatgcggaaaaaagcattcaagaatcacttgacgatatcaagggcaaagcggacatcatcattctgctttctcatttaggcctgatcgatgaccgggcagcagcggaaaaatttccggacatcgatgtcattcttgaatcacatacgcaccaccttcttgaggacggacaggacataaacggcgtattgcttgcatgtgcggagaaatacgggaactatgtcggctgtgtcgagctgacgatagaaagtgaatcacgaaccattgtcagcaaacaggcatctgtacagaaaatggctgattggcacggggaatctgaagatacggcggcttttctgaaagagaaagaacgggaagcggaaaacctgctctccgaacaagtcgccaatctgaatgaagaagccggcgtgaagtggtttgaggaatcgccgctcccgcttctattagccgaagcgctgaaaagctggtgcggctgtgaagtcagcatggtgaattcaggcgtcattttggggcctttacagaaggggcctgtcacaaaacttgacctgcaccgcatctgccctcatccgatcaatccggtcgccgtgcgtctttcaggaagggaactccaggaaacaatcagccaggccgcctcggaacaaatggagcagctgcggataaaaggcctcggcttccgcggggaagtgatgggcaggatggtatatgccggagcggaggcagaggccggcattcttgaagacggtgtgacgcatctcctcaatgtgaaagtgaacggagaagagattgatccggagcggatatactcggttgccgttctcgacatgtttacactcggaaagctgttcccttacatccgcgattcaaaagaaaagcaatactttatgccggagtttttaagagatctgctcgcctggaagctcgcgcagcagccgtaatgtcatatagctgtccgccattccatttcacccgagtgaaggtaagcgggactttttaagagtgaaaataaaatactatgtcccctcttacaagcatacattgtgatatgtaaggggggatttttcttgcctagataccggagcgctcttcgcaagagagggcctttgccttttcgatatgtgcttcttctgtcgtttgctttttttatcatatcaacagtcatcagcctctggatgatcaactcctcaatcaaaccggtgctgatgaacatcggagaaatggaaactaaacgggtggcgacagaggtcattacggaatccattgaggaatacatgtctcacagcgacaatgtgaaagatatggtcgatatgaaaacggatgaaaacggaaaagtcacaacgatggattttaatacacaaatggtcaacagcatgaaggcgaaagtgacaaagcagcttcaggctcatctgaaggaagtggagtcgaacaataagcagcatgaaacagaaaaaggcgcgaaaacggccgatgaaattatgatcgatattcccttagggcaggtcacgggaaacagcattctcggaaatctcgggccgaaaatccccgtgcgctttaacttgatcggcgatgcgttaactgatgtgaaaacaaaaataaagccgtacggcattaacaatgccctgattgatatcagtattttcgtggagattaaagtgaaggtcattattccgtttgccagtaagacttcagtcgtgacaaataatattccggtctccattaaagcgattcaaggagaggtgccgcagttttataacggaagcggcgggtcaggtgtgacgccttccgtccagctgccgaatgaaaaacagaagaaagataaataaaaacacacagccgcaatctttcctggcggctgtgtgtttactttttcctgcggatttctttacgttcccatgcccttaaatgaggatacgggtcaaaggaccattccgatctgccgttatctttatacatcccgtagtgaagatgcggcggaaattttcccgcggtgcccggcggtccgtatccggaactgccgacagagccgatcacttctccgggtttgacgatctggcctttatgcacaccttttgcaaagccgttcaggtgagcgaagtagtgatacgtgttattgatatccctgatgccgattctccagccgccgaaacggttccagcccttcatttcaacaataccgtagcaggtcgatctgacgggaagcccgtaatgagcgaacagatccgttccttcgtgaatccggcgcccgccgaaaccccgggcggcgccccacgtgctgcggtagctgtaatccgtcttcacgggaagcggaaaggcgtgctctccgagatcaaggcggccgaacgttttaaacagtgtcatgaattcggtgataatgccgaccgtctgatcacggcggtaataattccagaggccgatgcggatatggtcaagatccgttccgaatcccgctaaatactgagcaaatgtataaaggatatcctcatcattgctgacctcggcttttccgtcgccgtcgccgtccaggccgatcccgtcaaatactttaatgctgagaggcgcatcgtccttaggatttggattttcggggccgctccacaaatgatccggaatataaatgctgatgattcccgctttttccggcagatcctttcggttcgagcggacattttcttcatattgatcaaccgccgcaagcacataccaaggaatctgcgtgactgcttcggctttgcggtacaactgcatccgttcgccgtaaacaggagccgattgttctttcccgcttgcagccggacagaaaactgataaaaggagaagagcagataacagaactttcacaacatgatctcctttcaggattgaatacacatagtttgcggcaacaatccgagaaaatgtaagtaattctcttcccttgtcgagaaatttttcctatgttaaagtgactattgaatagaaatccgcaagttttacatccatcgtgaaatagaaatttttcgcacacgaacatgaataaagggataatggagatgatggggaaatggcaaagaaagacgagcatctgagaaagccggaatggctcaaaataaagctgaacacgaatgaaaactatacgggcctgaaaaaattaatgcgtgaaaataatctgcataccgtatgtgaagaagcaaaatgcccgaacatccatgaatgctgggctgtcagacgtacggcgacgttcatgattctcggttccgtctgtacgagagcatgccgcttctgcgctgtaaaaacgggactgccgactgagctggatctgcaggaaccggaacgcgtagctgattccgtcgcgctgatgaatttaaaacacgccgtcatcacggccgtagcgcgtgatgatcagaaagacggcggagcaggcgtctttgcggaaacggtccgggcgatccgcagaaaaagcccgttcacgacaattgaagtgctgccatccgatatgggcggaaattacgacaacctgaaaacattaatggatacccgtcctgatattctgaaccacaacattgaaaccgtccgccgcctgacaccgagagtccgggcccgcgcaacatatgaccgttctttggaattcttgcgccgtgcgaaagaaatgcagcctgacatcccgacgaaatcaagcattatgatcggtctcggcgaaacgaaggaagaaattattgaagtgatggacgacctgcttgcgaacaatgtcgacatcatggcgatcggccaatacctgcagccgtcgaaaaaacatttaaaagtccaaaaatattatcatccggacgaatttgccgaactgaaagaaatcgcgatgcaaaaaggcttcagccactgtgaagcaggcccgcttgtccgttcttcctaccatgcggatgaacaagtgaacgaagcgtctaaaaaacgtcaggcccaagcataagataagccgaaaaaacccaaaacgccgcaggttttgggttttttgtgatggagccgtttttgcagggaaaaagtcattcttgaataaggatcgtctgaaccgctacactggatataaagaggaaaaattctccgtccgtccgaaccgtctcattttgcaattgatggacagaagtcaatgaattatgatagtaaagagtgataaaagaggtgaagacatgattcttattcaaaatgccgagtttgaactcgtacacgattttaaaaacggctttaatgaagaagcgttcaaagcccgctattcggacatattaaataaatatgattacattgtgggagactggggatacagtcagctgcggctcaaaggcttctttgatgaccagaatcaaaaagcaacctttgaaacgaaaatcagcacattggacgaatacatttacgaatactgcaatttcggctgcgcgtattttgttttaaaacgaatcagaaaataattgatgcagaaggggatgctgtcacgtgtattttgttgacagaaataatatcgaacaaacactccgtttttttgagacccagctggcgctgtttgacagcacgcctgcatggcagagcgaaatcgaaaaaagggcgcttgagcggatcagccatcttatgatcgaatgcattctcgatgtcggaaatgatatgattgacggctttatcatgcgcgatccgggcagttatgacgacatcatggatattctgacggatgaaaaggtggtagctgaggatgaagggaataagctgaagcagctgatctcttccagaaagcagcttgtccaggaatatcagcatgccgaccatcaggagctgtttacgctgatcacgtcaaacagagatgtgctgaaagcctttccggcccgtgtaagaacctacctggaatcagaattagggcctgtttccgcatttaaataacaacgagtgagaaaatccacaggagtgttgagtatgaaggattataaaggatatttgatagatttggacggcacaatgtacaacgggacggaaaaaatcgaagaagcgtgtgaattcgtgagaacgcttaaagcgcgcggcattccgtatttattcgtgacgaacaattcttcccggacgccgaagcaggtggcggacaagctgatgagctttgacattccggcatctgaagagcaggtcttcacgacgagcatggcgactgcgcagcatatcgcccagcagaaaaaacacgcgtcggtgtatgtaattggcgaagaaggcatccgtcaggccattgaagaaaacgggctgagcttcggagaagaaaacgcggactttgtcgttgtgggaatcgaccgcggcattacatatgaaaagttggcaacgggatgccttgcgatcagaaacggtgcccggttcatttcaacaaacggcgacgtcgccattccgactgaaagagggcttttaccagggaacggttcgctcacatccgttttgacggtgtcaacgggcgttgagcctgtctttatcggcaagcctgaatccattattatggaacaggcgatgcgtgtgctcggaacggatatttccgaaacactcatggtcggcgataactatgcaacggatattatggccggcatcaatgccggaatggatacgctgctggttcacaccggagtgacaaagcgtgaacatatggccggttatgaccaaaaaccgacatatgcgattgactctttaaccgaatggattgaacatctataaaaaaagggacggccatgacggccgtccttattctgtatttctggcgctgtgagcaagccggcttgaagccgctgctgcgattgcgccgacgatatcatcaagaaacgtatggcattcgcccgtagatttatcatttaaccgcccgagaatgccgggtttttctttgtcaatgtagccgtaattcgtaaagccgatcgagccgtatatattcacgatagagaaggcgagcacctcgtcaaccccatacaggctttcatcaatcgccagaatggtctgaagcggttcagacagctttttttgttcggcgagcacatctaattctattcctgttaaaatggcgttttgcacctcgcgttttgcgatgacacggtccacattgagcctgcatacctccatcgtcaaatcaggatgatattttttttgaaggaaatacaccagctcggcgatatcggccgtctcaaccccccgttcttttaaacgcgccctggcgacagcttccacctgattcagttgttccttttctgacatttgcttcacccaatctttttttactagtttatacaacatccttccgatgtgtacgatgtttctccacttgattcaaaggattacaatatgtattcataattccgccggcgtatgactacgatgtgaatagctctaatttttcaggcaggtgattatgatgaaaagcatcattaaagaaaagtacggcatccacgtcagacagctttccgtttatcagaaataccaatgcttccagacgcctaattccttctttcttataattcccgtttccgggttttcgcaatcagagctgacggagctttactacatgagtcagtatttacaagaacaaagtgacccatacgtttcagtgtttatctttacgaaggaaggagaactgacctttgaggacgaaggcaaaacgtatgcgctcttaaaagcgccgattcccgtctcaaaccggtcgttttctgtcggaggggagcttgccgaatttcacagaaaagggcggggttttccgtacgaagtgaaagaagcgggcaggatcggccaatggaaggacttatggggaaaacgggtggatcagctggaatcattctggatgcagaaaattcatatgtctccgcttgaaccgttcgaaaagaaaatgatcgaagcatttccttattattcgggcttagcggaaaacgccattcaatatttagtggatacggagctggatgacaatcccggcgcagaagactcggggacaatctgccatcagcggatggaacgggatacctggtcggaggaatcactgatccgcattccgggcgattgggtattcgaccatgccgcccgtgatattgcggaatatatgcgcagcacatatttgtatcatcgtgacgacctgctcaaagatggttttttgtttctgcaggaatatgagcaagttacgccgttatcctccttttccaagcgcctgttttacagccgcctgctgtttccgctccatttcttcgagacggtggagagctattacatttctcatgattctgaaaaacagttttacgaagagcagcttgactacattcttgccgactgcacccgctatgaacagtttttacagacatgtcacaacatgatgaatgtcaggtcggcgcaggtttttgtcccgcctgtggcgtggctcggaaaaggaatcagttcgtaagaaaatatgacgtaaaaatatttagaaaatagggaatcttgtcatatcagtgtgttaagcgttttcatagccgtagaaacaatattcagccgcttgtcaaaacaaatacgggcttatataatatttgtaacttaaatgtctgtgaagggttaacaattgtccttttctagtggacgaaaggaagaaaggtggagtttctctttggaagcgattcgtattggactgttaggactgggaaccgtgggaagcggagtcgtcaaaattatacaagatcatcaggataagcttatgcaccaggtcggctgtccggtgacgatcaaaaaagtgctagttaaagatattgataaaaaacgagacgcagacctgccgaaagaagtgctgacgacagaagtctatgatgtaatcgatgaccctgaggtcgacgtgattattgaagtcataggcggtgtcgaacagacgaagcaatatcttcttgacgccttgaaagcgaaaaaacatgttgtgaccgcaaataaagatctgatcgccgtatatggctcggagcttttagccgccgcaaaggaaaatggctgtgacttgtattatgaagcgagtgtcgccggcggaatcccgattttacgcacgctcgaagaaggcctttcctctgaccggatcacaaaaatgatgggaatcgtcaacggaacgacgaacttcatcttaacgaaaatgattaaagaaaaaagcccgtatgaagaagtgctgaaggaagcgcaggatctcggattcgcggaagcggacccgaccgccgatgtagaagggctcgatgccgcgcgcaagatggcgattttagcccgtctcggcttctctatggacgttgatctggacgatgtcaaagtaaaaggaatttcccggattacggatgaagatatcagcttcagcaaacggctcggctatacgatgaagctgatcggcatcgcccagcgtgatgacaataaaatcgaagtcagcgttcagccgacactgcttccggatcatcatccgctctctgcggtgcataacgagtttaatgccgtttacgtgtacggagaagccgtcggcgaaacgatgttttacggccccggagccggaagcatgccgactgcgacatcggtcgtttccgatctggtcgcggtcatgaaaaacatgcgtctcggcgtaaacggaaacagctttgtcgccccgcagtttgaaagaaatctgaagcagccgtctgatatctatgcccagcagtttttaagaattcacgtcaaagaccaggtcggctctttttcaaaaatcacatcggccttctcagagcgcggcgtcagctttgaaaaaattctgcagctgccgattaaaggccacgacgacctcgcggaaatcgtcatcgtcacgcatcatacatcggaagaagatttcagtgacattctgcaaaacttaaatgacctcgaagtcgtacaagaagtaaaaagcacatatcgcgtagaagggaacggttggagctaatgtggaaaggactcatccatcaatataaagaatttctgccggtgacggatcggacgccggccctgacattgcatgaaggcaacacgccgttgattcacctgccgaagctttccgaaaagctcggaattgaactgcatgtgaaaacagagggcgttaatccgacgggatcctttaaagaccgcggcatggtcatggcggtcgccaaagcgaaagaagaaggcaatgataccatcatgtgcgcctctacaggcaacacatccgcggcggctgcggcatacgcggcgagagccggcatgaaatgcatcgtcatcatcccggacggaaaaatcgccttcggaaaacttgcgcaggccgtcatgtacggtgcggaaatcattgcgattgacggaaactttgacgacgcgctggccatcgtccggtcgatttgtgaaaaatcaccgattgcattagtgaattcagtaaacccttaccggattgaagggcaaaaaacagcggcctttgaagtatgcgaacagctcggcggagcgccggacattctggcgatcccggtaggtaacgccgggaatatcacggcctactggaaagggttcaaagaatatcatgagaaaaagggcaccggacttccgaaaatgcgcggttttgaggcggaaggttctgcggccatcgtccgcggcgaagtcattaaaaatccagaaaccgttgcgacggcaatccgaatcgggaatcccgccagctgggacaaagccgtgctcgctgcggaggaatcagccggaaaaattgatgaagtcacagatgaagaaattcttcacgcttatcagctgattgcccgtgaagaaggcgtgtttgccgaaccgggctcctgtgcatccatcgccggcgttttgaaacaggtgaaatccggtgaaattccaaaaggcagcaaggttgtcgcagttttgaccggaaacggcctgaaagatccgaacacggctgtagacgtatctgacataaaaccgatcacgctgccgacagatgaggacagcatactggaatacttaaatggagcggcgcgtgtatgaatgaggcggagatgctgttttccattacggttccgggaagcacagccaacttagggcccgggtttgattccgtcgggatggcgctcagcagatacttgaagctttcggttttccgaaacgatgaatggcagttctcggcggaaaccgaaactgtcgcgggcatccctcaaggaacggacaacctcatctaccaagtcgccaaacggacggctgaccgctatcaaaaagagctgccgcccgcccatgtcaaagtatggagtgacatcccccttgcacggggtctcggaagcagcgcggccgctatcgtcgccgccattgagcttgcggatgagttatgcggcctgcagctgtcggaaagcgacaaactgcacttagccagtcttgaagaggggcaccctgataatgccgctgcttcccttgcaggagggcttgtgatcggccttcacgaagaaggtgaaacacatatcgtgcgtgttgccgaagcggatatcgacgttgtggcagtcattccgttttacgaagttctgaccagggacgcaagagacgtgctcccgaaagagctgccgtatcgacgcgccgttaaagcaagcgccgtcagcaaccttctcgttgctgcgatcatgtcaaatgactgggcgctcgccgggaaaatgatgagaaaagacatcctccatcagccgtaccgcgccatgcttgttcctgagctttcaaaggtggaacatgcggccgaaatgaaaggcgcttacggaacggcgctgagcggagcgggaccgacgattcttgtcctgattgaaaaaggaaagggagaagagctgagaaaacagctttctgagcatttcccccactgtgagattgcggcgcttaccgtcccgtcagaaggaagcgtaattgaacggaatcctttagagcaggtgaaaagtgtataatgataaaaaagcgttcttcccatcagagaaggacgctttctttttctggagaaggatttttatttagggaagcgaaataaaaaagaaaaggaggagaaacgatttgaaaaaactcataaccgaggaggacattgcgactctcgtatccgtgacagacccgcaatatgcccctgacggcagaagagccgcttacgtccggacaacagtcaatcataagcgtgatgcctattcctcagccattatggtatatgacacagaatccggcatctcaaacccttggactttcggggacaacagaaatacaagtccgcggtggtcgcctgacggacggcgactcgcctttgtttctgacagggagaacggcatccctcagctgtacatcatcgacgctgccggcggagaggcggagcaggcggccgatattccttggggtgtatcagatccgatatgggcgcccgacggcagatccgtgcttgtgtccgtcagtctgacatcagcggagcgcgccgatgagaaagaaaaaaagaagcatgacgagtatgagccggttgacatccagtcattaacatataaacgtgacgggaaaggcctgctgaacggaagctgggtccagcttgtgctgattcatcttgaaacgggggagattcagcagctgacggatcatgaagcggatcattatggcgcggccttttcaacggatggcaggcagcttgcgtttaccgccaatttatacgagccgggtgacgccggaaagccgagcgatgtctatctgatgaatctggcggacggaagcctgaagcagattacgccgcaccgcggttctttcggttcctgcgtgttttcaccggacggttcttatatcgcgatgctgggccatgaaaatgaatttcgcaatgcgactttagaaaaagcgtggctgtacgacgtgaaaactgagcggctgtcctgcctgaccgacatgctggatgttcatttgagcgatgcgctgattgcggattcaatcataggaggagtgacgccccggccggtatggacaaacgacgggcagggcttttacgttctcgggagcgagcagggaagcaccggtatttattatatctcgattgacggcctcgtatatccgatccgattagaagaagagtatgtgaacggttttgcttttcatcctgatcagaaaagctgtatcgctgtcattgccaaacccgcacagccttccgagctttacagcatttcacttgaagatggggaagagaagcaattgacatttgacaatgatcggtttattgaggagcgtatcatatccgtgccggaaaagctgcaatatgaaacaaaggacgggcagacggtaaacggctggtttttaaagcccgccgtttttgaagaagatcaaacttatcccctcattctatacatacacggcgggcctcacatgatgtacggccatacgtattttcacgaattccaagtgctggccgcacaaggatatgctgtcgtgtatgtcaacccaagaggaagccatggctacgggcaggattttgtcaatcgtgtcaggggtgattacggaggcggagattaccgtgatgtcatgcaggcggtggatgaagccattcaggcgtatccgtttattgacagcggccgtctcggtgtgacgggcggaagctacggagggtttatgacgaattggattgtcgggcagacagaccgttttaaagcagccgtcacgcagcgctccatttcaaattggttcagcttccacggtgtcagcgatatcggtttcttttttaccgactggcagctcgggcatgatttgtttgaggaagcggataagctttgggatcgttctcctgtaaaatatgcgtcccgcgtttcgacgccgcttttgattctgcacggtgagcgagatgaccgctgtccgatagagcaggccgagcagctctttaccgcgttgaagaaactgaacaaaacgacgtcgttcatccggtttccgaaagccacgcatgagctgtcgagaagcggccatccggaacagcggatgaaacgcatccgttatatttgttcatggtttgatgactatttgtaaaaaataaaaaaaccaggctgtcatgcagcctggttttatgattaaaatacttgttctacttcaacgacacccggtacttcttcaagaagggcgcgttcaattccggctttcagcgtaatcgttgaacttgggcagctgccgcatgcgccaaggaggcgaagctttacgatgccttcgtctacgtcaacaagctcacagtcaccgccgtcacgaagcagaaacggacgtaatttatccaatacttcctgtacttgctctttcatttcaacctcagtcatgagattcgctcctttcatatacataaaaccattatattcacagtaacggtaaaaatctaatgtttggtttgcaaagctgctttccccattatagcatatttaaacttgaacataaaaaccgttttttatacaaaagctgctccgtcctttgtatactggtgtaaaggggatgatatacatgacaaagccggttacgctcagtgtttacggcgctgaaacgctttgcgcaagctgcgtgaatatgccgagcgccaaagatacgtttgaatggctggaggcggcgctgaaacggaaatatccggagcagccttttaacatgcggtatattgatattgacgcaccgcctcagcaaaaggagacagaagagcttgcggagcgcatcagaaacgatgaatttttctacccgctcgtgctggtggaggatgtcattgtgggggaagggaatccgcatttaaaagatatatatgaagaaatggaaaagcgcggctatgttgcaggctcttaaaaatggccgctgatcgcaatcagcggcttttttcttatcagccgttatgatgcttgtacatccataaaaggcctgattttaataaacggggcacacgcccgatgagcggacggtcgttgacaagaccgaagcccgctttttttccgagtgaaccgagaacgcctttcagcttaaattgcggcattgtttccggcagctcttcattgttccagcgtttcaggagaatctgcacaatttgttccgcttgcgcttcagccagctgggcgctcggcgcatgcggcaggctcgcgcaatcaccgacgacgtaaacatgctcatcgcccggaaggttgtgatgcggtgttaaaacgatgcggccttgcgggtctttttcagcgtccagttctctgacggctttattcggctgaattcccgccgtccacacgatggcatcggccggtattccttcatcatgattataaacgatgccgtcttccacttttgtaatattcgcattattgataatggtgacgccgtgttcttcaaaccatttttgaacgtacttgctgagtcttttcggaaagcttgataaaatcaggtcgccccggtcaaataacataatcttcagatcgtcacggctctctcttaattcactggcaagctccacgccgcttaatcccgctccgacgatagcgacagatgcattggcgccgaggttgttcagcttttgataggcctcgcgtgactgatcaatggtctgaatgctgtaagtatgttccggcgcgccgggcacgttatgatacttatcctcgcagcccagtccgatcaccgcgtcatcgtaagaaatcggttcgcggtcatgaaacagaacctgtttgtttttcgtgtcgacggaagccacctcaccgtattgaacatccagattcggatgctcaggaaaagacaccctgatatgatgatcagaaatcgtgccggcggcgagcgcataatattctgtttttaagcagtgatacgggtttctgtcaatcagcgtgatggatatatctgacggaagctggttcggcagtaagcggtgcagcacccgcatgtttccgtaacccccgccgatcaagaccaattttttcataatgattccccttttgcccgaaaaatatggtagtcaatgttgttacaaaataacgaactatgtaaaataacatctagaattatatcgaatttgatctaaaaccacaataatagttttaaaataacctacaaattgaccagaaaacacgtaatagtaaaacctttaacctgaattaatatgttacgataacattgagcgtgaaaccggatctttgacgaatagaggaaattccgttaggataaggtacatatgtgaggtgaaaccgcatgaatccgatgattgaattctgtgtcagcaatttagcgcgcggttcccaggaagcacttgagatcttagagaaggatccgaacttggacgtgcttgaatacggctgtttaagctattgcgggaaatgcatggagtccctgttcgccctggtcaacggcgaagtggtcacggggggcacgcctgctgaattggttgacaacatatatacattcatagaagaaaatccgatgttttaatcagaggctccgaacggggcctcttttttattgcgcccgggttttggcaaaataaaaaatttgtagacagcaaaaataaatattgttatcttaataaagactttttttaaataaaattttagaggtggattcattgaatatcgtttgggggctgctcggggcagttgctatattagccattgcttttttgttatcagagaagaaaagcaaaattaacctgcgaaccgtcattgtcggtttatgtttacaaatggccttcggattcatcgtattaaagtgggacgccggacgggccgtatttttatggttctcaagccgtgtgcagcttctcattgattatgcgaacgaaggcatcagctttatttttggcccgctgttaaaagtgggcagcagcccggcttttgcgctgagcgttctgccggtcattatctttttctcagcgctgattgccgttttgtatcacttgaaaatcatgcagctcatctttcgcgtcatcggaggcggactgtcaaagcttcttgggacaagcagaacggaatcgcttgcggcggctgcgaatatttttgtcggacagtctgaatcaccgcttgccattaaaccgctgattgcgggattgacccgttccgagctgtttacgattatgacgagcggcctttcggctgtagcgggttcgacgcttttcggttacgccctgttaggcattccgatcgaatacttgctggcggccagctttatggcggctcccgccggtctcgtgttcggaaaaattttaatacctgaaacggaaaaaacgcagacgataaaaggcgattttaatatggacgaagaaggcgaaggcgccgctaacgtgattgatgcagcggcaaaaggcgcgtccacgggccttcagattgctctaaatgtcggcgccatgctgcttgcgtttgtcgcgctcatcgccgtagtgaacggaattctcggcggaatcggcggctggttcggtttcaaacatattacattagaatccattctcggttacgtgttttcaccgatcgcatttgtaatcggcgttccttggcatgaagcgctcggagcgggaagctatatcggacagaaacttgtgctgaatgagtttgtcgcttattcaaactttgggccgcatattgcggacttttctaaaaaaacgtctacgattatcagctttgcgctgtgcggatttgccaacttctcttcgattgcgattatgctcggcacactgggcggtttggccccaagccgccgttcggacattgcgcgcctcggattaagagcggttattgcgggaacactcgcaaaccttctcagcgcggcgattgccggcatgtttatttagtaaacgataaaagctccctgcatatgcagggagcttttatgtatgaaaaacgggggatatttgtattgtgtccgagcagaagagcttttatactaagtaaaagaaaaaaagttggaggccgatatgaattcattccgttttaccaagatgcacggtcttggaaacagttatatatatgtaaatcaatttgaagaacagctgccggaagaacggctggctgagattgccgttaaagtgtccagcattcacacgggcatcggctctgacggaatgatcctcatctgtccgtcagaaaaagcgcccgtcaaaatgcggatttttaataatgacggctcagaagggaaaaattgcggcaacggccttcgctgtgtggcaaagtatgcatacgaacataagctgacagaagaaacgtcctttttcattgagacgctttcaggtcttgtgaaagcagacattacagaggacaacgggattgtgcgtgaagtcgccgttgatatgggcgaaccgcgcctcaccaaaaaagagctgccgatgctcggcaatgaagatgaacggacgatcgatgaaacctttgtttttggagaaacggagctttccggaacagccgtatcaatgggaaacccccatattgtttttccggttgcggatatcaatcaagcgcctcttacaacgctcggccccgtcattgaaaaagacccgagatttccggaaggcgtcaatgtcgaatttgtggaaaccgtcagcgccgatgaacttcatttccgcgtatgggaacgcggctccggcattacacaggcttgcggaacaggcgcctgtgcggcggctgtcgcatccgtattgaacggtgtttctgaacgaaaccgggatatcactgttcatttagcgggaggcgaccttgtgattaattggcaggataacgggcatgtgctgatgacgggacccgccgaaaccgtatgcagcggcgtcttttatttgtaaacagctcgtttgagaaatactctcctcaaggtttataatagatactagcatcgtttttaaaaaaggaggtctacctatgattgttccagtaaccatcactgaagcagcggctttgcatataaaagatatgatgaaagagcatgaagaagaaaacgcgtttctccgtgtgggcgtaaaaggcggcggctgcagcggcctgtcttacggaatgggatttgagcacgaaaaaggcgaaaaagacagtatgtttgaacagcacggaatcaccgttttggtcgacagcgaaagccttgatattatgaccggcacgatcattgacttcaaacagtccatgatgggcggcggtttcactattgacaacccgaatgccatcgcttcctgcggctgcggatcttctttccgcacggccaaaaacgccggtacgccggaagagtgctaagggtcaacccgctattcttaggatgaaaaaatatgacgtctttcttttcgatggcgcttccaccattgttaagaaaggcgtttatctgtttaataaaaataaaacccgctcaacagaagcgggttttccttttgcaaagaggttattcaattgtatgtttcatcgcattgtacatatttgccgtatgttcatcggctttatcccgtggcatgcgcagccgttcgactgaagaaccatacccgatttcttgtttgccctctttcagtcctttaaaaatcccatcagcgaattgatccagcggttctccttgagtatgcagccctgctccgcctaaatctgtattcaccgccggaggcgcaacttcaatcacttctacagatgaatcagaaagctgatgtctcagactcattgtaaatgaatgaagcgccgctttcgttgctgaatagatcggtgcaatggcaagcggtgtaaaagccaatcccgaagagacgttaatgacagccgcatcttcttttccggcaaaaaacggagcgaacagcatagacaggtggaagggagcttcaatgttcgtagtgatttctttattgaaatagtcccaattgtccttcgcatccgctttcagcacatgaaaacgttgttgaatccccgcgttgtttactaacacattcacttccggataattttctttcacccaatcaaacagtgatatacgttcagatggaatgctcaaatcactgacatatgtaataagatccgggaatgtttcctttgctttttgaagagcgtgctcacgccgtccggtcacaatgactttatttcccgcttttaaaaaccgttctgcgaaagccaatcctattccggcatttccgcctgtaatcagtattgtatttcccgtcagtttcatattaactcctcttttccgattgtttcatacttcttagataacatttcagctcccgcttctatcctgcagctgcaatccaatcaatatattttttggatcatcgggaaacccgccaaaactattctttccttgtcacaatatgatgatacggcttaaagcacggtttaagtcaacaaaagaaccttgtgattccgtttcggttactcacatcagacataggtcacgaaaggaaaggtgaatgtgaagtcttggaattttcttgatgtgataaagcgtaccgtataacatgggtgagagacaattaaaaaacgtttctgatcaaaacaaaaggacggcgatgcatgtgcaggaagggaacagcgttgatatcaggccgctcagcctgaatgatgcagagcgagaactggttttgcagacggaaaaccgcatgttttttgaacggtttgccatgtcgagacaagaggatttttatacgctggaaggccggaaaaaacgaattgaacaatcactgaagaatggggaaaatgacacagaatacagcttcggcatttttcttcaagatcagaccctgattggcacgatcagcctttttcaggtggttcggggttccctccaaagcgcttttatcggttattttttagatggcaaacataacgggaaaggctatgcgacgaaggctgttaagctggcagtcgattatgcattcaatgagctgaaactgcatcggatagaagccggagtcatgccgcacaataaggcgtcaatccgggtgctcgaaaaagctggctttcataaagaaggcattgcgagaaaaaatgtaaaaataaatggaaaatgggaagatcatcaggtgctggcgatcatacatccggaggatacatgacgatatcctccttttttatatccttcgtctctttcgacaggttctttctaaaacttcaaatcaattgtctaaatcatactatttgcaaattcaaaaaaaaataaagggtatatagaactgaaaaatctgaaagatgtgctcattgtcaacacgtcctaaagtcatatttttcgaaaggatattgattttttgataggattaaactaaattgtaaaagtatagaatagttaatttattttgtaagaaaaggatgatgatatgataggtcaattgagcaataaaaaaatatttttaagttcttttttcatcattttgatctgttcattactcttccaattcagtatttcagataaagttctgcagtcgtattattcttccgtcggagaaagtacctatgatatcggggagaaaagtgttcgtacgattgtcatgtttctgcaagggtttatgatcttcacaacttttgtggaaattctgataggcggatttctgttattcgttgccgcttttattctcggtacaaaaaaaccgaaaaaaatatatttgcttctatatacactgacttctttaatctcggcatttaaaatgttgattctttcagttgttaattacttaacggctgattcctcgcttatatattctgccggcggcaccagcttgagtctgcagctgctggacccatttctgctcatatcaatcgcggctctttatgctgccgcaggaaaactgaccgatctcagtaaaggcaagagaatcattttgactggatgttttgttttactaaaactctttactattttcttaaactattttatggcggataaaatttagctcgggagagagtcaattaagctgaattttattataaattaaaaaacagagtagggagatgttatgatgaacttagtaaaatctaataaaaagtctttcattttgtttggcgcggctcttgctgcagcaacattggtttatgcactattattaacgggaactgaattaaacgtggcggcggctcatgcattctcagccaatgctgaattagcttcaactctaggcatctctacagcagcagctaaaaaagcaattgatattattgatgcggcatcaacaattgcttctatcatttctcttatcggtatcgttacaggcgcaggcgcgatttcttatgcaatcgttgcaacagcaaaaacaatgattaagaaatacggcaaaaaatacgcagctgcttggtaaaatcgatcaataaataattgctctttttgtacaagctgcaaaaagagcctctctcccaaatacatatgtaaggattgaaagtatgatagtcaaacaaattgcggctcttatcaaatataataccctgtcatcgtttcgaaaaagaaaggaagattggggcattcctcaactcaacagcaaactgctgtctgccattattatttctctgttatgtttatatctcgttttcctgggatgcggtgttgtattcgggacaaaactgattcagctgcccctaagcgcatgggggcaatttgttttaatcgccgtttcacttgagcagcttttttgggctgccggcttctttaaagaacatcacaatgcctttctgctggatacgcgtaaggtcattcatcaattaaaaaaggttcgttttttacagctgttttctgtttttgccggccaggcgatcaaaaaaaccattttcgtatggtatctttttgtttttccggtttttttgtttttatcaagcgcaggcatgacggggtctgcggcgatcatcgtatttttcttgggcttcgtttattttcttctcaatttatttttatctatgctgttttcttatgttgtttatcttcttacaaatatgtggagcaaattgttttacttgaaaatcatgaaaggcgttttattcagcgtcagcctgctggttccgcttgcagtcgggtatgccgtttatcttctcgtgtttggggagtataccgcaaaggatatttcaagctttacggagacaccggctttccggaacatcctcatgaatacgccgtatgtatggttagcattcagctcacattccgcgctcgttttcgctgcggtgtttgcggccgccgtccttttaacggcggggatgtttaaactgtggtcggccaccctgaagaaaatggaccttattccttatatgtttttgacaaacgcagattttacgccaaagctgaaattatatagaaataacaaaatatttcatgccgtttttcaaaaggatctgctgttcttatcgagaattgacgggttttttatcaggaacttcggcagtatgctgtatttgttcatgctgtttttaggtttttgtattccgcttctatcgcatcactttctcgggtattcggcagccgccatcgtgtctgcggcggttatcattgcgaacttttcgtatcagctcgtcggagatgcgctcaaaacagtattatcagttgacggggaaataaaaaatcagcatttgtttcaccggaatatcaaacatgcgtggcagctggtatttccgaaagtatgtatttataatctcgccgctcttatctattcgttcatcatcaccattttgattacggtgttttttccgtcttccgcggcactgacgatttacttgtttattgtgtttttatgttcgggttttttatacagtcttgtccagatttcaagcaccgccctgtatcctaagaaaaactgggagcatctgtacgaaattggagaagcggggaaagcaaagacgtataacaacttatacagttctttcattttcattgtgtcgcttcaaatcgctgcgatcacgtcgtattttatctataaaaagccggaacttgaaacgatgcttattcattcggcatcaggtatttttgtcctgttcacactattaaactatggagtcatgtttctgtttcttcgcagaatcaatatggcggaaaggtttgcgaacaatgattaaattagtgaatatacaaaaaaactatagtgaaaaacaggtgttgaaagatatttcgtttgaggtgaaaaaaggctcaatctatgctttgctggggactaatggagtcgggaaaacaacgactttgaaaatcatttcgggcctgcttaaaccgacttcaggccgcgtcatgattgacggcaaggaactggattcagaagagggggggcaaatatcggctgatatcggttttgtgcccgaccatgcttttttatatgattacttaacgggagtcgaatacttgcgttttacagcggagatgtttcaagtgccgtctcagcggacaaatgattatataaagaatatgttagagacgctgaagcttgctcaagacggaaatcagctgattaaaacatattcacatggaatgaaacaaaaattatcaattgcggccgcgctcattcatcagccaaagatattaattcttgacgagccgctgacgggcattgatttaatcagcggtaaaacgatacggacgttattaaaggagtacgtcaagcagggaaatacggtcctgttatcaactcacctgctggagctggcgcattcgctgtgcgatacgatcggtattatacatgaaggcgtttttgcggcggagtatcagtcatccgagcattcattagaagagattgaagaattggctgagagtatctatacatgatgaaccgcatgttgccggcaatcagaacgtccgccattccgttaaccgcgtcattgctgtttttttcaggcggtgtgatcgctgcgtttttttccgatcactttgtttcgaccgcgtcttacaacggctcgtcaggcgcggttgaactgctgaaaaacaatgcaatcgcctgtctgtttttagccgcgggtttttttacctttgggttgacctcaatcttttatttattcaccaacgggtttattttaagcggctctattatagaaaatctgcatagcggggttcctttttatcagatttttttactgctaattcctcatggtatatttgaagttcccgcgttattattaagtggcgccattggttttaagggcgttgaattggtcatcaggctgtgtttttctaaggaaaaaaagataatggcttcaatgttcaggcatattggaatattggtgctcataattatttgtctgctgatcgccgctgccattattgaagcttacatcacaccaatttttaagtaaaaggggcagaaatcatatgagaagtaaattatcattaatcggtgtgccgattgttatgattatcggttatatcatttctttatcctttgagtggctgtttcctgttcttacttttggggtggcaggactatatctctttatatttgcaccggtgcaaaataaattcattcgttacatctttttgtttatttttgtgattaatctgttggccagtgcggctctttattccggtatttaataaaaaaaatgacattcatattgaatgtcatttttttatcttcgagcggctctgctgtgtgttaaaatctgtcgccgttgaaaatagagttttttacgatcacgtagtcgacattgcggatggcttcgagtgtattgccgccggcgtaagagatggaagattgcagatcctgctccatttcaatcagcgtgtcctgtaaagaccctttatgttcgacatgcatttttttgccttcgacgtttttcttttcgcctttttgaaattcggaagcggagccgaaatattctttgtacagcttgccgtcgatttcgatcgtttggcccggtgattcctcgtggccggcgaataatgatccgatcatgaccatagatgcgccgaaacggatggatttcgcgatatcgccgtgcgtgcggataccgccgtcagcaatgatcggtttgctcgccgcttttgcgcaccagcgaagcgcggctaattgccatccgccggttccgaagccggttttaatctttgtgatgcagactttcccggggccgattcccacttttgtcgcgtcggcgcccgcacgttccagctcccttacagcttcaggcgttccgacattccctgcgatgacaaagctttccgggacatgttctttaataaattgaatcatgctgatcacggcattggaatggccgtgcgcgatatcaatggtaatataatccggcacaagctcctgtgctttcagctcccggatgaattcgtaatcattttccttcacgccgacactgatggaagaaatcagtccgcgcgctttcatatcccgaacaaaagtcaggcgtttttccggctcgaagcggtgcatgatataaaaatacccgttttccgcgagccaggccgcgatgttttcatctataatcgtctgcatgttggccggcacgaccggaagtttaaacgtgtgtccgcccaatgtaactgatgtatcacattcagatcggctgtccacaatgcattttgcaggaatcagctgaatatcttcgtaatcaaatacattttccatatataacacccctaaaagcgaataatataattaaataaaattaaaatgttcgtctttttataatgtactttgttttgtcaggaatgtcaaatgatttcatgctgcctcatatccggtcagcttgtcatccatttgcagtttggttatcatagtagtattgggtgttgtaagacatttgttacgatagatagatttgcagaagaagggaggggccggtgtggaacaaaaacagcccgggcacagcccgaaagcccagaaaattcaggaccggattattttaggcacgatttgggtcgtgtcggcgcttgtcattgcgcttgttgtcggaaccgtcatgaattatatttggatgtttaaataaaaaagagtctgtgccggtatgacacagactcttttttattatttttcaaacatgcttgtagaatgcagaggctggacgcgcgctttcgggtccatgtaagccttcgcgttgttcacggctgtcggagcttcgccgaaaccgctggcgatcagcttgaccttgccttcatatgtgcagatatctccggcggcaaagaagccttcaatattcgtttccattgtgcttttgacgacgatggaatttttctcgatttcaaggccccagtttttaatcggtccgagagaagaaacaaagccgtagtttacgatcaggtcatcaatttcgatgatttctttacggtcgcctttcacttcttcgagaacgagctgttcgatccggtcttcaccgacaagttcagcgggaacaaacggtgtcagcacgttgactttagaattatgcaggttttcgacactgtgctcatgcgcgcggaatttatcacggcggtggatgatgctgacttctttggcgatcggctcaagcatgagcgcccagtccaccgcggaatcgccgccgcccagaacggcaacgcgtctgcctgcgaattgattgaggtcgtcaatgaagtagtgcaggtttttgccctcatattgttccgctgattccagctcaagctttctcggcttaaatgcgccgtttcccgcggtgataatgaccgtttttgaataatgcgtttctgaattcgtgacaagcttaaacacaccgtccgcctgtttttcaacagattcaacggcctgctctaagcagatggtctgatcgaactttgccatttgctcttttaagttgttcacaagttcctgggcgcggattttcgggaatccggctacatcataaatatatttttcagggtacagcgcgctgagctggccgccaagctgaggcaggctctcgatgattttgacgctcgcctgtctcattcccccgtaaaaagcggtaaacaggccgaccgggccgccgccgatgaccgtaatatcataaacctttgaatcctcttgcataccaaattgcctcctaattgaaaattgttattaattataacatacaatttaaaaggatgacgagtgccgaaaaccgcccggccgcttcattcttgaaaaaaattgcggccgccgctaatatggggacaaattccaatctgttttttcctgaatgttttctgattcttccggatagtatggtgatatgcagacatgtgcggttttctaaaaaattttatatttcatttcataaaatcccgccaataagctgaagctaatacaaatgttgatttgattatacgtctaacagcaaaaaaaagaaggtggatgtgatggcattgaataaacccaaaatcgtggttttaggtgcaggttatggtggattaatgacagtaacaaggcttccgaagcatatcggggcaaatgacgctgacattactttggtcaataaacacaattatcattatgaaacgacatggatgcatgaagcgagcgcaggaacactgcatcatgaccgctgcagatatcaaataaaagatgtaatcaatgaatcacgggtcaaatttgtgcaggataccgtaaaagcgatagatgtgcaaaataaaaaggtgacgctttcacaaggggacatcccttatgattatcttgtcatcgggcttggcgccgtccctgaaacattcgggattaaaggcttaaaagaattcgcttttccgatcgcgaatattaatacgtcgcgccagctgaaagaccatattgagctccaatttgcgacatacaatacggaggctgaaaaacgccctgaccgcttaaccatcgttgtcggcggagcgggctttacgggaattgaatttctcggtgagcttgcgaaccgcaagccggagttatgcagatattatgatatagatgaaagtctcgtccggatcgtctgtgtcgaggccgccccgacggttttgccgggatttgatccggagcttgtcgattacgccgttcaataccttgagagcaaaggcgttgaatttaaaatcggcaccgcggttcaagaatgccgcgcagacggtgtcacagtcggcaagaaagatgaagagccggaagaaatcaaatcccagaccgttgtctgggcggcgggcgtgcgcggacatccgatcgtggaggaagcgggttttgaaaatatgcgcggccgtgtcaaggtcaaccctgatcttcgggcgccgggtcatgatgacgtttttatactcggcgacagctcgctctttatcaatgaagagacggaacggccgtacccgccgactgctcagatcgcgatgcagcaaggagaaacggtcgccaaaaatctgggcggtttgattaaaggaggccagcttgaagagttcaagcctgacattaaaggaaccgtcgcctccctcggtgagcataacgctgtcggagtcgtatacggcaggaagctcaaaggcatgccggcgtcctttatgaaaaaggtcattgacaaccgatcgctctttatgatcggcgggctgggcctgacgctgaaaaaagggaagtttaaattcttctgaaaacccgcggccgcgggttttctcttcttttaaaaaagagcgctatcaaaagcatgtaaaagaaaaaaaagaatgtttccgcttacatgagttgttttgttacatattctgacttggtgcttgacaagtaaatatgatatattatcagaaaattaagaaaaagggtgatccgcatgaaaacgacagcaaaaagcacggcggcgtgtccgttctgctcaggtaaagggtattttcaattgcttcttggcggctccgaaacatgtccctcctgccagggaagcggcaaagagagacgatgatttttccagacgttgacttttttaccgcccccgaggtacactgaaagtgctgtagggggtggatgtttgtgattagtttgccggttgtcctgatctcaatcgtactattttttgtactgtttttcggcataggctttctgttgaacatgctgcttagaatgtcgtggattatggctgttgtctatccgattgtatgccttttcattatcagcaataaaaagatgatcagttacgtgcaggcgccgggggaatcctttcaaagcctgtttcagcgtatcatgtcattagcggttgcggatgtcgtgattttggcgggcggactggcgggagccatcacgtcaggcattgccataaaggcgctcagaaaaagaggatatcaaatgttttaagccgctttcttatttgagaaagctttttttgtgtcgcggcgctttttgtatagcacctcaccgagttgggaacaatgactcggaggagagtgatttcagattgacgataatcagacgcgtattcatgatcgtgctctttttgggcgcatgccatgcgacatacttttccataaccggtgttgaagcaaaggatctgacaaactggatgaccgagcatcgcggcgccgttttgaaaaacatgggcactccgtttcaatccttacagaatcagccggaaaagaaggcatcaggcaggataaaaccgctggaagaagcttttgactgggaacgctatccctcacataaggtgacggccaccggttataccgccggagcggaatctaccggaaaatctccgggtcatccgcagtacggaattacatattcaggcgtgaaggtcaaacgcgatttatattcaactgttgcggccgatccgtctgttttcccgatcgggacgattctgtttataccgaattacggttacggggttgtcgccgataccggctcaaaaattaaaggcagccgccttgacctctactttgacaccgtcaaggacgtctataacaattggggcaaaaaaacacttgaggtctacatgattaaaaaagggaacggcacagtgaccgaggacgaacttgtaaagctgaacgaaacaaagtcgatgcaagtgttcagaaatcaatacaaaacggtaaaagaataaaaacgcttcagcatccgctgaagcgttttttacataaagagataatctaaaatcaatgtcagcacaataccggtgacgccgccgaagaatacttcaatcggctgatggccgagcagttctttcagtttcttctgtttttccttctcttccgctttctgaaagtccttcgcttcgctgacaaaccgattaaagtcgatgaccagtttattaatgaccgtcgcctgttcacccgcatgccgcctgacacctgtagcgtcgaacatcgtaatgacggcgaaaatcgcggcgactgcaaacaggggcgagtccagcccctgttgcaaagcgactccggttgacagcgcagtgacggcggcggaatgggagctcggcatgccgccggtgctcgtcacaagagaccagtcaagttttttggatacgataaattgaataggcacttttacaacttgggcaaaaataatggcggcaaaactcgccagtaaaggaaaattcataagtacatccatatgcgacatcctttctgtatctgctgattccgatcgtatcgaaaaactgcagaaaacgcccttagtttggtaaaataaaatcaatgaaaaatgttttttcattataccactttacataacaaatacccacataaggagtgtgtactcatgttttatgcatctgatcaactgcggcatcccgaaacactggtcatcggtctttttcaaaaaagcacgctgaacggatttacgaaggaattggatgataaattggacggtcatctgacccagctgttaaaggatggtgatgtgtccgccaaacgcaatcgtgtatcaaaagtataccctccggctgcgaccggtatgaaacgtatttattttatcggtctgggaagagaagcggattattcgtttgaagatacgaaagaatgctttgcgcgagtatttcagcagattcatcaagataaaaaacaggaagtatccgttttgctcgatacattcgtctccggtgaagtgcctgccgccgatgccgctcatgcgctttcagaaagctgtctgcttgcggtttacgaagtgcaggattataaacataaatcgaatgagccggatcaggaactgaaatcagtctgcgccgtgaccgaagaagacctgagggaagtgcaggccggcctgaatgtcggcgcggcatacggccaagggacgaattcagcccgcacgcttgtaaatatgccgggtaatatgctgacggccaccgatttggcgtcatatgccgctgagctggcggcaaaatacgattttgagtgtgaaattttagaaaaagatgaaatggaagagctcggcatgggcgggctgcttgctgttaacaagggctcatccgaaccgccgaaaatgatcgttctgaagtatcagggcaaagatcaatgggaagacgtcatcggcctggtcggtaaaggaattacctttgatacgggcggatattcaattaagccgaaaaccggcatcgtcggcatgaaaagcgatatgggaggagccgcttcggtattgggcgcgatggaaattatcggcgaactgcggcctgaacaaaatgtgctcgctgtcataccgtctacggacaacatgatttcgtccgatgctatgaagccggatgatgtcatcgtttcgctcagcggaaaaaccattgagattctgaacaccgatgcggaagggcgtctcgtgcttgccgacggcatcacatacgccaagcagcacggagcctctgtcctcgtagacgtcgcaacgttaacgggcggtgtcattgtcgccttaggaaacgaaatgacgggcgccatgaccaatcacgccgcgttttatgaacaggtggctgaatcggcgaaagaatccggcgagccgatctggcagcttccgattacagaaaaggataaaaaacgggtgagaaacagtcagatggctgatttgaacaattctccgggaagagaaggccacgcgattatggcgggggcattcattggtgaattcgcggaaaacacgccgtgggttcatctcgatattgcgggaaccgcgacggcgaataaagcgacatgcttcggccctgccggcgcaacaggcgtcatggcaaggacgttggctgttttgactgagcgctttacgcccgaaagataacagcaacccgctgccttgatgcagcgggttttttgatttccaaaatctttagttgactaaagcacagaatatatggtaactttaattatctactacattagcaaactaaaggatttttggagggactcatcaatgaatgctgttgttgtcgcagtattgcttatgctcgtcttaagcctgctgcgtgtcaatattattatagctttaatgatcggcgcgcttgccggcgggctgaccggcggcttaggcctcggagagacggtgaaggcttttacggacggtctcggcggaaatgccaccgtcgcggtcagctacgcgctgctcggagcatttgccgcggcgctgacaaaaacggggcttcccgatgcaatggtggaagcgtctgtcaaactaatcggaaaaaaggaagattcgcggaaaaaagcactgtcaaaagtgttaatcgtactgattattttaatcatatcctgtttctcgcaaaacgtggtgcccgttcacattgcgtttattcctgtattgattccgccgcttttaaaaatatttaacgaacttgaaatagaccgcaggctgatcgcgtgtgtgatgacattcggactgactgcgccgtatatcgttctgcctgtcggattcggacagattttccaggggatgctgagagataatatggcgtcagccggtttaaaggtgccgctcagtgatatcccgtatgctttaatcatcccgacggccgggatggcggtcggtttaattttagccgtcatcgtcttccggaaaccgaagaaatatgagacgaaggagattgccggactatcgtcttctccttatacgaaaaaaagcattgccatcgccttgatctccattgccgtgtcgcttgccgttcagctctatctgtcacaagtgctcggagtggaaggtatgatcatgggcgcgcttgccggcttgtttacgctgtttataagcggagtcatgaagcgcaatgaagcggataagctgatcacggacggcatgattctgatggcttttatcgggtttgtcatgcttgttgcggccggtttttcaaatgtattgaataaaacgggcgatgtggcttccttggtcaaagcatcaacaggctttatcggccacagccaatcattgggcgcgctcctgatgctggtggtcggtttattaatcacgatgggaatcggatcatcatttgcaaccgtacccgtcattacgaccatattcgttccgctgtgcgctcagctcggattcagcccgatggcaacgatcgccgtaatcggagcggccgccgcggtcggcgatgcgggttctcctgcaagtgacagtacgctcggcccgacgtcaggcctcagcgccgacggacagcaccaccacatatgggatacgtgcgtaccgacatttattttctataacattccgcttgtgatattcggctggattgccgcgcttgttctgtaaaaaaaggctcccgaaaaggggagcctttttgtatgctgagaacatcctacgccggatttctgctgaaccccgtcgctttatgaatagacctgtatacggcaggcgcgattgatgccaataacagtgctaaaacgatatcttttatgaaaaaccatatcatgtaaaaccaggccattccgtagctgatcggagcatgaagccataatttcagcgcaatatacgtataggtcgtgccaatgatataaatgacggcggtaccgatcaaagaggcccatgcataatgcaggcggccgggtttttttgttttttccagcagccatccggctgcaaatgccgccgggatgtaagcgagaataaatccgccgctctttccgataaacggcgcaaagcctgctgagaattgggcgaaaacaggcgcccccgcgagtccggccaatgcgtataccgtcattgcgatggctgcccgtctggcgccgagaagcatcgcggctaacagacaaaagaaaggctgcagcgataacggaattcccgcaacttgcaaaaaaggagccattgatgtaatgttggcgccgacggccatcagtgcggcaaacatgccgataagtgccatatcgcccgcgcgaaggttgcgttgtttcatttgtttttcccccttacacttgtaccagattagcgtaatcgaagggtgattgattgtcaacacagatttaatgtaggtttactaaatggagggagccatatgtttttcgggaaaacgaaacaaacaaaacagtcggaacggattccgccaaaccaaaatgtcacaacgaagtttcccgtgcttcacgccggaaatgttccttattatgaagatatgtcaaaatggaacctgcaggtgtacgggcttgttgaccgtcctatgctgttaagctttgaagatatcaaagcctttcctgaagccgaagtgaaaaatgatattcattgcgtcacgggctggtcccgtcttgataatatctggcagggaatacgcgcgaaagacatcgctgagaaagcgggcgtgcacaaagaagccggtttcgtcattctgcacgctgaagagggctggacggccaacctgccgctttctgattttacgcgggaaacatccctgctggcatatgcgcataacggcgagccgttaacgccagagcacggctatccgctaagaggcgttttcccccacctttatttttggaaaagcgccaaatggctgcgcggcattcagttcacaaaggaaaaccaccccggcttttgggagaaaaacggctaccatatgaggggagatccatggaagaacgagcgctttacatgggattaagcccctatcactatatagttcttaggtaccttattgaaataaggtgctttttttatatcaaaaatccattgactttgtttggcaaaaaacctattatttgaggtgtcttttgatattgaaaatcattatcaataaggatagataaagcaattgccgcaaaggggatgaacacataatggacggaaaacaaataaagcggggtttcacgccggccggccgatacgcagttccgggcacagaagtaagagaaatgcgctctaaaggaggccgtacatatcgtatctttgtctcttttcctcaggaagaaccgcctgtatccggtttccccgtcatatacctgctcgatgcgaattccgtattcggcacaatggccgaagctttgcgggtgcaaagccgacggcctgaaaaaacaggcgttgttccggcggtgattgtcggaatcggctacccgacagatcagccgttttccgccgaacgtcacagtgattttacgatgccgctttctgaatcagaactgccggtgcatccgcacggcgcggcatggcccgaacagggaggggcggaagcgtttctgagttttatagaagaaaaagtaaagcccgcgatggagcgggattatccgatcgacagaggcaggcagacgattttcggccattcgctgggcggtctttttgtgctgcaagtgcttttgacgaggccggacatgtttcagacctatgttgccgggagtccgtcaattcactggaacaagcgttttattcaggaaaaagcggaacgtttgtcagaccggctctctgcggaaaatcttcaagtcagcgtattgctggctgcgggagaaattgaaaaaacacataaaagcagaatcccgcagcacgcagaggcgctgtactctttattatccggttttgaagatgatggagtccgtactgaatacagcgagtttgaaggagagggccatatttctgtcctgcccgttttaatcagcagggccctgcgtttctgcctgaatccgggagggccgcataccccgtattctcccgcatgagaaaaaacaggcccttcgaactaaatacggctgattctaattttctaattgactgcgtgttttgatttggatatgattgtcttgaatcataattgataatgataatcattatcaatatagaaagggaatgataatatggacgcattgggaatgaaagggaaaacggccgttgtcaccggcgccgctcaaggcatcggagaagcaacagcgcttgcccttgctgaacaaggcgtaaatgtggcagctatagatacaaatgaagacctgcttctcaggcttactgacagactccggcaaaaaggcgtgcaggcgcaggggtttgccgcagatgtatctgacagtgcggctgtcaataatatcatcgccgccgttgaacgcgacatggggcctattgaaatattggcgaacgttgcgggcgtgctgcggccgggtccggtgcaatctctcagtgatgaagattgggatcaaacattttcagttaatacgaccggcgtatttcatgtgtcgcgggctgtaagccggtacatgattgagcggaaaaagggcgccatcgttacggtcggttcgaatgcagccggcgttccgcgtgcttccatggcggcttatgcggcgtcaaaagcggctgccgccatgtttacgaaatgcctcggactggagcttgcggcccatcatatccgctgcaacatcgtatctccgggttcaacggaaaccgacatgcagcgggcgctgtggcaggacgagaacggagcccgggacgtcatcagaggttcgcttgatacatataaaacgggaattccgcttcaaaagctggcgaagccttctgatattgcaaatgccgttttgtttctggcttctgaacaggcaaaccatattacgatgcatgatttatgcgttgatggcggcgctactttaggcgtttgatttaacgagaaggagggacaaacatgacaaatcaacatgtattgacggaagtgtcagcaaaagaggtgctggacgcttacaagcccggggcgttctttttagcttccccgaaaagtacgatgcttgcggaaggaatgtttgcggaagtgcctgatacagacacggaaaatcagctggattcactgcctgaacgcgtgagacagacgcttcttgaggcaaagcaagccggcatcaaacatccgattgcggccggcgccattccttttgacggcagaaaagcttcccggctttttgtaccgaagaatgtccatacggcaggcccgctttcgtttgcggaatcttccgcagaaaagccgcaatccaatacatatgacatccgtcccgttccggagcctgagggctttatgagcggtgtggaacaaggcgtattcaacattacggacggtccgctcagcaaaatcgtgctgtcaaggacgcttcatctgaccgctgaaaaggatatcgacattcctcaggccgtcaagcatttggcgcagcacaacccgcgcggctatacattcgctgcggatgtgacgggaacgtcagaaacaagaaaaacgcttttcggcgcaagtcctgaactgctgctgtccaaaaatggaacatcgattctgtccaatccgctggcaggttccagacctcgcagcacagatcccgccgaggatcagagaagagcggaagaactgctgcaatcagcaaaagatctgcatgaacatgccgtagttgtggccgccgtggccgccgcccttaaaccgttctgccgtgtgcttgatgtgccggaaaaaccgtcactcattaaaactgaggcgatgtggcacctgtccaccgaggtaaagggagagcttcgtgatccgtcaacgacatcacttgagctggccatcgccctgcatccgacgcccgcggtatgcggaacaccgacggatgcggcgagagaagcgattcaggatattgaaccgtttgaccgcaatttctacacgggaatggcgggctggtgtgatgctgaaggtgacggagaatggattatcgcactccgctgcgccgaagcggaaacaaggtctctccggctctttgcgggtgccgggattgtcgccggatcaaagccgcaggatgaattggacgagacatcggcgaaattccgcactatgctccgggcgatggggctttaccaagatgagttgtaaaaaaggagggaacggatcgtgctgactggatttacgccatggccggaagaatgggctgacaaataccgaaaagacggctgctggaagggtgagacgttcggaggaatgctgaaagagcgcgcggctttatacggaaatcaaactgccgtgacgtgtaaagatgtacattggacctacaaagaattagatgaaagggccgatcgtttagcggcgggactgcataagctcggaattcaaaaggaagaccgcgttgtcgtgcagctgccgaatatcgctgagttttttgaagtgattttcgcgctgttccgcctcggagcactgcccgttttcgcgctgccttctcatagaagcagtgagatcacgtatttctgcgagtttgcagaggcgaaagcatacatcattcctgatatgcattcaggttttgattacagggcgcttgccagacaggtgaaagacaaacttccggatttggcgcatgtcattgtggccggcgaagctgaagagtttcaggaactgagcagcctgcatagagaggctgttcagctggaagatgtaagcccggcggaagtcgcctttttacagctttcaggaggcagtacggggctgtccaagctgattccgcgaacacacgacgattacatatacagtttgcgcatcagtgcggaaatatgcggcttggatcatcacagcgtttatttggccgctctgccgacagcgcataattatccgctcagctcgccgggtgtgctgggaactttatatgccggaggccgggttgttctgtcaccgacgccgagtccggatgactgcttcccgttaattgaaaaagaacgtgtcacgattacagcgctcgtcccgccgcttgcgatggtgtggatggacgcatccggttcgcgaagtgatgatttatcaagccttcaagtgctgcaggtaggaggcgccaaattcagcgctgaggcggcccgccgcgtgaagagcgctttcggatgcacccttcagcaggttttcggaatggcggaaggattggtgaattatacgagactggatgatcctgaagagatcattgtcaatacgcaaggcagaccgatgtcaccttttgatgaggtcagggttttagacgatgacgggcgggatgtcgcccccggtgaagcgggacatttgtttacacgcggcccttacacgattcgcggatattataaagcgccagaacataatgaaagatcattcacagccgacggattttatcagaccggcgatatcgtcaaactgacggcggacggctatatcatcgtcgaaggacgtgcgaaagatcaaatcaatcggggcggtgaaaaaatagccgctgaggaggtggaaaatcaccttcttgcgcaccctgccgttcatgatgcggccatggtttcaatgccggatgattttctcggggagcggtcctgtgtgttcgtcatcccgaaaggagaagcgccgaaaccgggagagctgaaagcatttttacgtgagcgcggactggcggcatataaaatccccgaccggattgaatttatcgcttctttcccgaaaaccggcgtcggcaaggtcagtaaaaaggatcttcgcgaaacgatcgcccaaaaagtaaagccggctgaaatcaaacaatcttaaaaaaggaagtgtttacattggctataccgtctattcccgcatatgcgctgccgacagcgtcagatatgcctgaaaataaagtatcgtggacgctgaatccgaaacgcgcggtgcttctgatccatgacatgcagaattatttcgtcgatgcttttgcgaaaggtgtcgctccgatcacagaggcgtctcagaatatcaaaaaaataaaagagcaatgcaaagcactcggcattccggtggtgtataccgcgcagccgggcagccaagacccggcggaccgcgcgctgctgacggatttttggggaccggggctaaaaagcgggccttatgaagaaaaggtcattccggagcttgccccggatgatcaggacattgtcctcacaaagtggagatacagcgcgtttaaacggacgaatctccttgagatcatgcgtgaaagcggcagagaccagctcatgattacgggaatttatgcacacatcggctgcctcgtcacagcatgtgaagcatttatggatgatatccaaagcttctttatcggagatgccgttgctgatttttcttcagaaaaacataagatggccatcgaatatgcgtctcagcgctgcgcttacacagctttgacaaacgaagtgctggagctgctgggcggcgcgccggttactgaaggagaaaagaaggcttccgccgtattgacaaaagaccgggtgcgggaacaaattgcggcgattcttcaagaatcaccgtctgatattccggatcatgaagacctgctggacagaggtcttgactccgtcagaatcatgagccttgtcgaacaatggcgccgtgacggagctgaagtgacgtttgtggaactggcggagaacccgacgctggaagagtggtggagacttctttcttcccgatctcaaaaagtcttgccgaacgcagattatttataaagggagagaatagaatgcatgatacacaacagctgcctctgacaggcgcacaggccggtatctggtttgcgcagcagcttgatcctgataatccgatttacaatacaggcgagtacgttgagataaacggcgcgatcgatgtgaacatatttaaaaccgctctcgaacgcgtgctgacggaagccgcgtcattacacgcccgcttcgaggagggagcagacgggccgaagcagatcatcaatcctccatttgaggctgcgatcgatgtcatagatgtgagttcagaagctgatccgcagcaggccgcactcagactcatgcagacagatttggctgagcccgttgatatggcggccgggcctttgttccgcgacattttatttcaggcgggaccggaacgctttttctggtatcagcgcattcaccacattgcgatagacggctacggtttttcactgctggcacggcgtacggcgcaaatgtacaccgcaatacgggaaggacgtccggataacgggcgctccttcggctctttggaggagctggtaaaagaagaacaagaataccgcgcgtctgatcaattcctgaaagatcgggaattttggatggagaaatttgcggatgaacctgatgtcgtcagtttggcggaaagagcgccgcgaacgtcaacaagttttcggagaagtacggcttatctttctgaaacggctttacagcatgtaaaagcgattccgaactggcatgaagccgttactgccgcagcggcggtatatgtccaccggatgacaaacgcaggggatatcgtgctcggtttaccgatgatgggacggatcggctcgatttcactgaatattccgagtatggtcatgaatcttctgcctttacggctttctctccgcccggatatgaattttcatgaggccgtcagccaagtggcaaaagaaatccgaaacatccggcgccatcagaaataccgccatgaagacatgcgccgcgaccttaaattgctcggagaaaatcgcaggctgttcggcccgcaagtcaatgtgatgccgtttgactacgcgcttgacttcgccggagcgcgggggaccgttcataacttatcagccgggcccgttgatgatttgtcaattaacgtttacgacagagcggacggaagcggaatgcgtgtggactttgatgcgaatccggaagtgtacagcgccgaagatattgaaaaccatcaaaaacgattcctgcttctgttggaatcagctgtgaaagaccagacacaaaaaatcggcacactcaaccttctgcttgaaagtgaacgtctccgcgtactggaaagctggaatgacacgcgcaaggccgagaagcagaaaagtctgccggagctgttttacgaacaggccgtaaaaacaccggaccggccggcaatcatcaccgaaaacgaagagctcagctatgccgaattgaacaagcgcgcgaaccagcttgccggcatgctaaaagaaaaggggctcggaccggaacaatttgccgctttgctgcttccgcggtcacaggagttggccgtgagcatgctggccgttttgaaaacgggagccgcatacctgccgcttgatcctgattttccttctgagcggatcacatacatgctcaaagatgcacagcctgcctgcctgattacaacgatggaattatccggccgcatgccggaagacagtgatgcaaaaagaatcattctcgatgacccggatacggtaaaaaccgttgccgctcaaaatgctgactgtcccgctcaggcggaatgttcgcctttgcaccccgcttatatcatctatacatcgggttcaacgggcaaaccgaaaggcgtagtcgtgacattaaaaagcgtaagcaatttcctcttatccatgcgggaaatgttcccgctcggcgaacaagaccgcctgcttgccgttacgactgcggcgtttgatatttccggacttgagctcttccttccgctcatcagcggggcagggtgcgttatcgcacataaagagacgattcaggaaccgcgggcgcttgcgcacatgattcactcatacggtatttcaatcatgcaggcaacgccgacattgtggcattcattagttaccaatgaaccggattctctccgggcgctgcaggtgcttgtcggaggtgaggcgcttccgaaggcgcttatgcatgctctgcttgaatcaggctgtacggtgacgaatctgtacgggccgactgaaacaacaatctggtcggccgcacagccgcttgcaaaaggccatacaggggcgcctccgatcggaaagccgatttggaacacgcgggtatacgtgctggacgccgcattgcagcccgtcccgccgggaattgcgggcgagctttatatagcgggcgaggggcttgccagaggttattataaccgtcctgatttaacagctgaaagattcattgccgatccatacggccccgcgggcgcgaggatgtaccggacgggagatctcgtgcgctggcgtgaggacggctcgcttgattatatcagcagagccgatcaccaaattaaaatccgcgggttccggatagaattaggagaaattgagtcagtgctgtcgaaatatccgggtatttcgcaggccgccgtcattgtccgtgaagaccagccgggagataagcggctggcggcttatgctgtcgcggatcggccccttgatatcggcgaacttcgtgcatatatggccgaaagcctgccggattatatggtgccgggcgcgtttgtacagctgaaggaattgccgctgacgccgaataagaagctcgatcgcagcgctctgcctgcacctgatttttccgctgtcctgtctgacagagggccgcggacaccgcaggaagaaatattatgcgatctgtttgccgaggttctcggtctcgcgcgggtcggaattgatgacgggttctttgaattgggcggacattcgctcttagccggacgcctgatgagccgggttcgggagacgatgggcgcagagcttggcatcggccgtctgtttgatacgccgaccgttgccgggctcgccgcacagcttgacaccgcaaagagtgcgcggcctaagctcaagccgtttgaccggccggagcacatcccgctgtcatttgcgcagctgcgtctttggtttctctactgtcttgaagggccaagcccgacttacaacattccggtgattgtccgcatgtcaggcaagcttgaccaatcagcgctgaaacacgccttttacgatgtggtcagccgtcatgaaagcctgcgcaccgtttttccggaaaataagggatcatcgcatcagctcattttatctgctgaagaagcccgccctgtgtttacagtgacacgtgcagacaaaaacgagctccaagacatgcttgccgctgcggcacgatatcggtttgatctcgctaaagagccggccgtccgggctgagctgtttgatcttggtgacggcgagtatacgctgatgattctcctgcatcacatcgcaggtgacggctggtccttgaatccgctcatgcgtgacttatccatagcctatatcgcccggcaaacaggtgaaaaagcagaatgggcgccgctggcggttcaatatgcggattatgcgctttggcagcagcagcttttaggcagcgcgtctgattctgagagcttaattgcgcgccagctggatttctggaagaaaacgcttgaaaatgtaccggatcagctggagctgccgtctgattttccgcgtcccgctgaatcaagctacaggggcggcgtcattccggtcaacatcggccaagagcttcatgcccgtcttctctcacttgccagaaagcagcgcgtaagcctgtttatggtgcttcaatcagggctttccgcgttactgacccggctcggtgcagggaccgatattccgatcggcagtccgatagccggccgcagtgatgacgcattgggagaccttgtgggtatgttcattaatacactcgtgctgagaaccgatacctctggcgatccgagcttttgtgagctccttgaaagggtcagagaaatgaatctcgcagcatatgaacatcaggatgtgccgtttgaacgtctcgtggaagaattgaatccaagtcgttcccgatcaagacatccgctgttccaagtgatgctcgcattccaaaatacgcctgaccctgtactcagtcttcctgatatggaaacaagcctgcaaatcagcagtgtcggatcgtccaaatttgatttgacgctggaattggcggaacagcgccatgacgacggcacgcctgccggtattgaaggcctgctggagttcagtacggacttattcagaaaagaaacggccgaagcacttgccggacgcctgcttcttctgctcgaagatgctgcatcacatccggaaaaaccgatcggaagcttaaccattctttctgatgaagagcgccggaagcttttgccggttaaacaggcaaaacagcatattcagcctcggcagacactgcctgaactgtttgaaatacaggccgccgcaaaatcggatgaaacggcggcagtatttgaagagagcggtctcacttataaagagctgaatgaaaaagccaatcagctcgcgcacatgatgattgcccgcggcgtcggcccggagcagtttgtcgcactggcgctgccgcgttctttagatatgattgtcgggctgttagccgtcctgaagacgggggcagcgtatttgccgcttgatcctgattatcccgcggaccgcattgcttttatgttacatgatgccaagcctgtatttatgctcaccaatcgtgaaggcgcaagtaagctctctatcgaaagcggcatgccggccttcatcttggatgatccgcagaacaaggaaacacttcggcaatatgccgtcacgaaccctgagaatgccgaccgtattcgtccgctgtcaccgcttcacccggcctatgtcatttacacgtcgggatcaacaggtgtgccgaaaggtgtcatcattccgcacagcaatgttatccggctgtttgagtcgacgcggcattggtatcactttcattctgatgatgtatggacgatgtttcactcctacgctttcgatttctctgtctgggaaatgtgggggccgctgcttcacggcggacgtctcgtcgtcgtgccgcatgacatcagcagatcgccggaagcgtttttacatcttctcgtgaaagagcgggtgaccgtgcttaaccaaacgccgtcagcgttttaccagctgatgcatgcggaaaaagaacacaaagagctggggcgtcagctcgcactcagatatatcatcttcggcggcgaggcgcttgagctgagccggcttgaggattggtacagccgccacgcagacaatcagccggtgctcgtgaatatgtacggcattacggaaacgacggtgcacgtcagttaccttgaattagacaaaaacattgccgaactgagagcaaacagcctcatcggctgcggtattcctgatctgaacgtatatgtgcttgatgaccggctggagcctgtgcccccgggcatcactggcgaaatgtatgttgccggaggaggcgtggcacgcggctacttagggcggcaaagcctgaccgccgaacgctttgtggctgatccgtacggcccgccgggaacgagaatgtaccggacgggggatttagcccgcctgcggacggacggttctcttgattatatgggcagggcggaccaccagattaaaatccgcggcttccggattgaattgggagaaatcgaagcggttctcgtcaaacatccggatgtcgaggatgccgccgtagtcgtccgtgaagaccggccgggagataaacggctggccgcctaccttgtccgatctgccggcagcaccttggacacgggggacatgcgccggtttgccgaagaaagcctgccggattacatggttccgtcagcttttgtccaaatgaatgaactgccgctgacaccgaatggaaagcttgaccgaaaagcgctccctgcgcctgacttccaaacggaggtcaccggccggggaccgagaacgccgcaggaagaaatgctgtgtgagctgttcgcagaggtgcttcatctgccgcgtgtcggtattgatgacagattttttgatttaggcggccattctttgcttgcggttcatttaatgagccgtattcgggaagcgatgggagccgagctcagtatcggaacactatttgaagctcctacggtggcaagccttgctgaaagacttgagtcaggaacgggcgcaagcgcgcttgatgttcttcttccgctcagaacggcaggagaagaaacaccgttgttctgtgtccatccggccggcggtctcagctggtgttatgccgggctgatgtcttctttagaggctgattatccgatatacggcttacaggcgagaggcatcggaaaaaaagaaccgcttccgcaaagcttagatgacatggcggcggattatattgaaaaaatccgcaccgtgcagccgaaagggccgtaccgtctgctcggctggtctctcggagggaatgtcattcaggccatggcgacacaattacagagccggggggaagaggtttcgcttttggtgatgcttgacgcgtatccgaatcattttctgccgataaaaaatgcgcctgatgacgaggaagccgtcatcgcgctgcttgccctgggagggtacgacccggacagcctcggggatcagccgcttgattttgacaccgcgctgaccattctccgccgtgagggaagcgcattagccagcctggacgagtcagtgatgatgaatctgaaagacacgtacattaattctgtcgggctgttaggaacatacaagccgaagccgttccacggagatgtgctgttcttcagatccacgattattccggagtggtttgacccgattgagccggatacttggaaaccgtatattacggggaatatcgagcggtatgacttagactgccgccataaagatatgtgccagccgggcccgcttgccgacatcggcgcgattctggcagagaaattaaacggacggcgtacagtccggtagagaaaggaaagaatgatatgacaaatccatttgaacgggaagacggctcataccatgtgctcgtcaatgctgaaggccagtactcactgtggccggcctatctggatgtgccggacggctgggaaacccgcgtcacgaatgaaacccgccccgtttgtctcgaatatattgaaacaaactggcgtgatatgaggccggaaagcctgaaacaggacgaaaccgctaaaatgtaataagaaaagcctgccgttatttcggcaggctttttatgcggacatcagccgttaagctgtgtatgatcacaaaatgtataagggtggccttcttcattcgtgcaccatgactgagacagaaaagccaaaaagaccgcggcccactggtctgcaaactggattaaaataccgccgtcgtgccacgttccgttatccttcttccagcgtgtatcaattgggtttccctgattcatatgaatattatgcatgccgtttgtcggcttgaacccgaaaatcttatcagcgcccggctccggcccgaatttagagccgtaaatatagacggtggctttttctgatttggctttttgcatgtacgtctcaataaagtcatttaagtcattatccggaccggtgacttcatgcgggaggggcaccatgttccggggatcaaacaatccgccgcggacataatccagcgccagctcacggctggtttcatcaattggggtatatccatacggaatgttgggcagcagggtgatcgcgcttgcgtcaaaatgatcgcgtgccgcatacagaacctctgattcttttgaacttgacatgacattgatcgcacagcgatagcgcgtatcaggctcgcctagcacctcgacttgaaaatgcggagaatcatcatctgtttcccttttcatatctgacacagtgccttttaatacaccatagtgctgaacagccatatgaatcctcctttttctttcgggatatgaattgatattcgagacagggggccgtttttccttttatgagaaagaaaaaaggacagcccgctgatcaggctgtcctcttcatatctattaagcttttgcagccgaaccttgcattgctttttcagcaggcacgtagtcatagcctaagtctttggctaccgcttcatacgtgacatgtccgttagccgtatttaagcccgctttaagcgcagggctgtctgcaatggcttgtgccgcgcctttattggcgatttgaagcgcgtaaggaacggttacattcgttaatgcgagcgtagacgtacgcggtacggcgcccggcatattggcgacagcgtagtgaacgacgccgtgtttttcgtaagtcggattatcgtgggttgtaatatgatcaacggtttccacaatgccgccctgatcgatggcaacatcaacaatgacggaacccggtttcatttgtttaaccatttcttccgtaacgagagtcggcgctttggctcccgggatgagcacggcgcagatcagaagatccgcttccgcgacggaatctgcaatatttacagggtttgacatcaaggttttaatctgatgcccgaaaatatcatcaagctgacgcaggcggtctgcgtttaaatcgatcattgtcacatcggcaccgagtccgacagccattttcgcggcatttgttccgacgccgccccctccgatgatcgtgacttttccgcgggatacacccggtacgccggctaataaaattccttttccgccctttggtttttcaagaaactgagccccgatctgcgcggccattctgccggccacttcggacatcggcgtaagcagcggaagggaacgtccgtccgttaccgtttcgtacgcgatagctgtcacgcctttttctgtaagcgctttagctaattccggctctgcagctaaatgaaggtaagtgaataagaccagaccttgacggaaatacgcatactcttcagccagcggttcttttaccttcatgaccatttccgcatcccatacttgctttctgtcctccagaatttccgcccctgctgatacgtaatcttcatttgtaaagccgcttccgagtcccgctccggattccacaagaacccgatggccgtttccgataagctgtgaaacgcctccaggtgttaatgccactcgattttcattgtttttgatttcctttggaaccccgataatcatgtctgtttcccccaatgtttgtgtgatacttcaagtgtagcgcgatttttgcgaaaattctttgtttgaaacagaaaataaaaaaacacggatttgtgaaatttcacgaacccatgctgcgaagtttgatatcaaggtaaatcgtaaacttttcattcacattttttaagtcgatttctgcgatctggctgattcttttcagcctgtaattcaatgtattgacatggatgttaagcgctttagcggcggtgttgacgttgctgtcggcatcaataaaatgttcgagcgtttttaccatatcggcttggtgctccctgtcatactgctcaagctttgagagggaatagttcatatagccgctgtgcttgcgtttttcatccaacacatccaggtactgataaatgccgagttccgagaagctgaaaaggtgtttggtttctctcacaaaccgctctttcgcttttaatacggaaagcgcttcctgataggagcggtaaacgtaagaaatcgattcgtaaataccgccgaccgcaatcgacgcatcctcaattttatatcgttccttcagctgtttttgaatatgaagggcgaagtgctttaaatctttaaaaggctgatcggttttcggcgcggctaataagattaattcatttgaatcgacagtcgccagcatgacatgaatctgctgtgtcgtttcctgcaaatattgcagctgctgttctgtcttttcagtcagctcatcatgtaaacggatgatcatgacgctgaacacggacggcagcgccattccgagcttatgaaacccttcggccatctcggcttcctgataaatatggccggtcagcattttccaaaaaaactcctggccccgctcttcgattttcgttttgcggatctgcaggtgcaaaagtttgttccgcaccgctttggctgccagctgaagtgtcttcagatcttcgtcattgagattttttttgatctcaagcgcccaaataaatccgagaacctgactgtttttccagatggaaatcgccacgcggttgcttaggcccacctcgtcaatttctttcactttgatcggctggtccgtttttaaaagagccggaatggttccgtctttccacagtttgttgatgactttctccggcaccctccgcccgataatcgtcgacgtccgggccggatctgtacaatcgctgtgcgtgctgtatgcaagcagtttatgattaacgtcttctattgtaatggggcattgaagaacttcactgatatggtcggcaacatcttcaagcctgtcgaaactgtacttaaatggatcctttggattggtcatctgtatccctactttttcatagcttcatatcttgatcttaccatcttgcttttcagactgaaaggcatctttgcagggaaatagactaggacaataagatcattcgatgaaaacgaaaataatgagaaaatcatactacttcatttacaaaatgtgtaaatataccgaaaaatccaatatatcataagactcattttgtaaaattaaaacagatttgtttgactgtgccgaatggttgtttttataataatgacgttcaaaaaataagtgaattagcccatatttaggctgatgacacaggagggtataaggaatatgtctggattaattcgtgtcacacccgaagagctaagagcgatggctaagcaatatggcgttgaaagtcaggaagtcatgaatcaggttgaccgcctgaaccgcatgatttctgatttgaaaagcatgtgggaaggtgcttcaagtgaagcatttgcagatcaatatgagcagctgaaaccttcatttattaaaatgtctgaattgcttcaagatgtgaatcatcagctcgatcaaacggcaaatacgcttgagtctactgaccaagatatcgctaaccaaattcgcggataataagatgaatgaagaaacggagcgcctgattcaatcaagaagacggcgctctttctatgtaagggtgatatgaatatgtatatcgatattacaatagatttaacacattataacggcagcgtcttcgatctcagattgtcagattaccattctgtgaaaaaagtcatcgatattgcccggcaggctcagcatgtatctgttccgccgcgtgaaggctattggatcagagtggtcaataaagaagccgttttttccggagaacaaaagctatctgactgcggcattacgaacggagaccgccttgaaattttatgaaaggacatggtggaatgacagatcataaccgatcttatttagaaacagaattagacgccgtccgggaagaaaccgaatcaggcttcacgttcaccttccagcgggaaaaaatcaagcttcttgacgggctggaagcaaacgtgattaaagatgctgatcctttttttcaaaaagaggtctcagtttcagaagacgaagtaaccatcacaatcaaacctccttcttcttatcaggctttccgctatataaaaggaaaagataaaaaaagcaggtggcaatttgcctaccgtctcgtccaagccgtgaaacagcataagctgaaacgtctcaatctgattgccgcccctgaaaatatcgtgtttgataaagcgctgacgccttactttcttcattacggcgtaaaggagagccttccgccttatgaggaagatagagaaagggtgttaaaagagctcaaagcctgtgcggcgcttgcagctgacggggcgtacaccttcgatgaatatttgaagtacaaggagacgcttcacttctctcctgaggtgaaaagcgtgctagaggcggagacgattgaagaactggaagaaaccattcaaaccgcaattgattccctcgaagaaagggacaagacatacataaaactgccgaaaaagaaatggaaaatccaaagatacgccggtctggcgcttgccgtcctccttgtgccgacacttctttactccttatacgttctgtttttcgcccagccaaagcaagaggcaattacggaaagcaaccgctattttttaaatcagcagtacagcaaagtcattgacacactcgctaaatacgatgcggaaagcctcccggaatctgtccagtacgagcttgcttcctcttatgtggcagttgaaaatctgagggaagaacagcggaaaaacatcgggaatctggtgacgctgcaatcagacccgaagcacttcctttattggattgatatcggcagaggggaaaatgaagaagccatcaaaatcggccgcaatcttgagtacaacccgtacatctggctcggacttacaaaatataaacagcaattattagcggatgacagtatgaaagacgacgaaaagcagaaagaactggacgccgtggaaagcgagcttgcgaaggcgaaaaaagaggcggaggagcagcataaagaagcggaggaaaacggtgacaccgccgaagcttccgccggacaggatgaaagcaaacaagacaaagcgaaagataacaaagagaacgacaagaaagatgagaaaaaagatgaaaaaaaataacagcacacatcaaatggccgcaggtaacgatcaggctgtcaggaggttcgccatatgagtctgttatgggttttttaccgagagcacgtacaaaagattcagctgtctgaactcccgccgtctcagccgattacgatcggtccggatatgaaagatactatcacggtcggcacacttccattacggcaaaacgccgcaaccctttatcgaaaagaaacagatcgttatgatgttttcctgggaaataactgtgccggcgaattgacaataggaaatgaaatgccctgccggattgaagaagagacgatgcggcttctgctcacccctgacaaagaagaatcctccgtttattttatcggcgggaaggatgagatcgttttctcatcagaaatagaggaagcggatatatacaaagagccgtcctccgctcaaacaggggctttttatctgcgaaagtcgggaggatgctggtctgtcgtccctgatggccaagacgtttatgtgaacggaaagcttgcagaagctaaaggaaggctccggacgggagatgagctgctgtggaattttctgcgtgtgaggctgacggaggacgaccttttagaagccgttcatcacgaaaagcttcataccggtttaaccaaaacggtaaaaccaagcaccgaaatgaaaaagaaatacccgcaatatcgaagaacgccgcgcatggtctacgatcttccagaagaccgcgtttcattcagctttccctcgcaggaaagcgaacagaataaccgggggctgtggctcgtcattctgcctcctttggtcatgctgattgtaatgggggttgtcgccattatacagccgaggggcatattcatcctagtctctttggcgatgtttatgatgactctcattacctccaccgtgcagtatttccgtgaaaaaaaccagcggaaaaaacgggaggagaagcgggagcgtgtgtacaagcagtatttagaaaacaaaaggaaagaacttcaggcgctgtcggaaaaacagctgcaagtgctgacgcatcattttcccacgtttgaaaaaatgaaatatttaacctctgaaatcagcggccgcatttgggagaaatcgctggaaagcagggattttctgatgcttcggctcggaacgggcacggtcccggcaagctacgagatttcaatgagcggcggagacctggcgaaccgtgatgtggatgacttgatggagcagtcgcagcacatgcagcgcgtgtataaagatatccgccatgcgcccgtgactgttgatttacaagaagggccgatggggcttgtcgggaaacctcagatcgtcaaaaatgaaattcaccagctgatcggccagctcgcgttcttcaacagctaccatgatctgcggtttgtctttatctttcatgaggacgaatataaggaatgggaatggatgaagtggctgccgcaatttcagctgcctcatatgtacgcgaaaggatttatttacaatgaacagacccgcgatcaattgttatcgtccatttacgagctgctgcgtgagcgggatttggaagaagataaagaaaagaagatcttccagccgcattttgtctttgtcatcacaaatcagcagctgatcgcagagcacgtcattttagaatacatcgaaggccggcatgagcatctcggcatctcggcaatcatcgccgcggaaacgaaggaaagcctggcggaaaacattcacaccctcgtccgctacattaatgaagatgagggagacattctcattcagcagaaaaaagcggtgcagatcccgtttaagctggacaggcacgaacggaaaaacaacgagcgtttttcccggacgcttcggacattgcatcatcaggtcggaatgacgaattccattcctgaaacggtctcatttctggagctgtttcatgcgaaggaagtaaaagaaatcggcatcaggcagaagtgggagacaagtgagtctgcaaaatcgctggctgttccgatcggctataaaggaaaagacgacatcgtctatttaaacctgcatgaaaaagcgcacgggccgcacggattgctggcgggaacgaccggctccgggaaaagtgaatttctgcaaacgtacatcctgtcattggcagttcactttcacccgcatgaagcggcgtttttgctgattgactataagggaggaggaatggcccagccgttccgcaagatgccgcaccttctcgggaccatcacgaatattgaaggaagcagaaacttcagtatcagggcgcttgcatccattaaaagcgagctgaaaaaacggcagcgtctgtttgatcaatatcgcgtcaatcacatcaatgactatacaaagctgtataaacagggagaaacggatattccgatgccgcacctgtttttgatttcagatgaattcgccgagctgaaaagcgaagagcctgactttatcagggagcttgtcagcgcggcccgcatcggacggagccttggtgtgcatttaattctcgccacgcaaaagccgggcggcatcattgacgaccaaatatggagcaactcacgctttaaggtcgcgctgaaagtgcaggatgcaagtgacagtaaagaaatcctgaaaaacagtgatgcggcgaatattacggtcaccggacgcggctacttgcaagtcggaaataacgaagtgtatgagcagttccagtctgcctggagcggcgccccttacatggaagatgtatacggcaccgaggatgacattgccatcgttaccgacaccggcttaattccgctgtctgaggtggacgcggatgatgcggcgaaaaaagacgccccggcagaaatagaagccgtagtcgaagaaatcgagcggattcaaaatgaaatgggcattgaaaagctgccgagcccgtggcttccgccgcttgccgaacgtatcccgcgcacgctttaccctgcgcaggaaaaagaccgcttcttcatcgcctgcgtggatgagcctgatcagcaaagacaggcgcctctcgcttatacgatgatggatgacggcaacatcggcattttcggctcatccggctacggcaagtcagtggctgccatcaccttcctgatgaacttcgcggaaggatacacgccggaagagcttcatatgtacatctttgatttcggaaacggcacgcttttgccattggcaaagcttccgcacaccgcagactatttcttaatggatcaaatgagaaagatcgaaaaattcatgatccgcatcaaggaagaaatcgagcggcggaaacggctgttcagagaaaaagaagtcagccatatcaaaatgtacaattcgctcagtgaagaagagctgccgtttatatttatcacaattgacaatttcgacatcgtaaaagatgaaatgcatgaattagaaacggaatttatccagatttcacgcgacgggcaaagcttaggcatttacttcctgctgaccgcaacgagggtaaacgccgtccgccagtcgctgttaaacaacataaaaacgaaagtcgtccattatttaatggatcagtcagaaggatactccatttacgggcgtccgccgttcagtctcgaaccgatcccgggccgcgtcatgatccaaaaagaagaactgtatttcgcgcaaatgtttcttccggctgaagcggaaaatgacctcgagatgttccaggcgctgaaagatgatgtaaaagctttagctgagcgccacgccggaacagccggcccacacccgattccgatgcttccggataggctgacggccggagaattttcactccgtctcggcccggatcaagaaccgttccgcattcctgtcgggcttcatgaggaaaaggtcagccctgtgtactttgatctgggcaaaaataaacattgtcttattttgggccagacacagcgtggaaaaacaaacattctgaaagtgatgctgaatcacctgctgcgtgaaggtacggaacgggtcgggctgtttgactcgattgaccgcggactgtcgcagtatgcgcaggaaacaaaggtcagctatctggatacaaaagaagacgtccggcagtggatcgaaacggcagaagccattttcacggagcgcgaagctcagtatgcgcaggccgtcaaaaatggcgatgtgcacaaactcagtttctctccggtcgtgttaatggccgacggcattacaagattccagcagacgatcgacaccgccattcaggacaaactggcgatgtttatgaaatcttacgcgcatgtgggcttcagttttatcccggcgggcaatcacagcgaattctcaaaaggctatgattccttaacgacggaaatgaaacagatccgccacgcgatgctgcttgtgaaaaaatccgaacaaaatgtcattccgctgccttaccaaaggcaggaaccggacattcagccgggcttcggctatttggttgaaaacgggaaggagcaaaaaatccaaatacctttatgttcagcggaaagggaggccgtcagatgactgaacaacgaaaaagcctgatcaaattaatagccgcggtcgtcatcattctgctgctgccggtgctgtttttccggtttatcggcgatgacccgggaaaacaaaaaatcaacgccacccgccaaatcgcagtcgtgaatgaagatatgggcttacaaacagatgaaaatgaggaagaggaatccgtccatttcggcaaagaagtagcggccgctcttggcggccgtccggattattcatggacggttgtcaacaggagcgcggctgaaaacggtctggcggctaagaagtatgacgccgtcgtttacattccctccgatttttcaaaagacatcttaagctatgacaaggagcgcccgcaaaaagccacgctgacattcaatattcaaagcaacctgaacgccgtcaacaaagaaaaagtgcagcgtgagctagaagacgcccaaaaatcaatgaataaaaaaatgtcggcattatattggaatttcgtctcacaaaaagtgaacaatgtccgaggcgattttgacaagatcgtcaataaagaatcagagtttcaaaacgtcatgtacaatttttacaagccgagctccaatgacttggcaggtgaaatcaagcggcaaaaagacctgattgacgaactgaaaaaatcaatgaatgaagcgcagggcgcggcaaaagaaaaattgacttcggcagatgaagccaaaaccacgctcaaagactttgccgatacggtcgagcgctataaacaatatcaagaaaatcagaaaaaactgctgatggccgcgcaggaacaaaatcaaaagcaaatcacaaccggactgaatgccattaaagcacagcaggccgccaaccagttcagcacgatgatgagcgggctgtcttcaggcataaaccgggcgcagacacagcttgaccagacaggatcggctcttcttgccgcccaacaggtgagagaagcgcaggttcctgatcaggaacgcgggatggcagatattcaatctaatttactgaacaattttttgactcaatataaagctcaagcaagatttgaaacactgaacagcatccaaacccttatgaaaagggatcggcaggcattaaccgttccggaaaaggacccgggtgatgacggatcggatgaaccgaaagaagaagaaaaaccggaaaaagaaaatcccggcgatctgaaaattgaccttgatgatcagcgtgacgaattaaagcgcatctccgctgaaatcaatcacatttctgacggattaaaagaaccggaaaaagaaaatccggcccctgaaaaaccgggccaaggtgatgacggtgaaaactccggcgataccgatccgaataacggaacaaatcccggagaagacggaaaaacggaagacggtacaaaagaagagcagcctgcctccgataacacaagcgatcaggagccaaaaaccgtccagaccgccactgccgctaaaaacgtcactccgcctgctgatgagccggcggacgatccaaacgattctgaaggggacggcggcacggacatatctgaggcgaaagaaaggctgaaccaagccgcagagcgcattcagcaaattgaaaaagagctggaagagaaacagcagactcataatgaagaactgaaaaaacgtctcgatgctcttgatgaagaaatccaaggccttcaagaccagattgatgacgtcaaaaaacgggcagacaaattaaagaaaaagctggaagaatcagaaggaaagagagaacaagatttcaataccatttacagaatgattgtaaaaacagaacagaacattctgaactacccgtcattggatagcggccgcaaatctgctcttgaacagatatttgccgctgacatcaatacaaaagaaatatccgatttaatgagttactataatgatttatccctgtatgaggcgacactttatcactctcttgacgcgggcccgctgcctgatgtgaaaaacagggtgctgaaagcccagcaaggcgaagttcaaaccgttctcgccatcaaaccggtggaaacggcaagctgggaaaacctgaaaaagaacaagatgcagacagatgaagacatcagcaatttcattaaaggcatgaccgaattctcggataactacagttcgtatatcagagatgaacaagccggagtgctcgatgagctcgccagcatttcagacagcgcggcgaaagcatccgatcagctggctgaaggcgctgtgcaggaagcggccgcattcagcggagacggattaaccggaacgatggcgctcggcgctcaggataccgtcggccgcgaagtcctgcaaatgtctgacacgatgggccatctgtcagaacgccagtccggcatcatcagctataccgacaatatgcagcaaagcgtaaatgacgtccagcaaaaagcggacaccttaaacagcaactggggcaaaaacgtcgattccacgaaattgatcagaaatgacgtgtacggcattttagggaacgcgctcgttgatggacaggaaaacggctacgtttacgattatctcgccaacccgcttaaaatcagcggagaggtgccggaagaccgggttcagaatgttccgccggtcgtcattttggtgatcgtcctgatcagcagtcttctgatcggctatttcagctcgtattatcagcaggcgccgcttcttgtcaaaggcgcgctctttgggattttaaacattatggtcggattgatgatcagtctgttcggtctgaatatctactcgcttccggatgatcagacgattaaatggtcagtctttacgattctcttgcttgcggcgagttctgcttttatccgggcagcctttgtcttcggctcgattaccggatggattgcatcatccgcgctcattctcttttatgtggcgcctttgatcgacctgattatgccgaacttcacctttgacagtccggtttcgaaagtctatatcgatattcaatacggaacggggcatctgtttgcgatgggggtaacggttcttgcgatcattacgctgattgcggcggcgcttccgctcgtcattcggctgtttgcggaaaaaacggaggaaagtgatcagtcttatgaggcgtaacacaatcatggaaaaaggattgctgctgtttgctctctcctttttccttttccttccccaagccgcagccgcgaatgaggaaaatactgatgtcaagccgaatgaatatgaaaagaaagacattgaaattcgtacggattacctgcacgacgatgcctactctgaggaaaaaacggcgcttccgaaagaacagaaggatatcacgtttgatcagccggccgaaaacccggatgacaaactgatatcaaagttgtttacatcgtcagacacggagccgaatacgatcaaagcgcaatcgaaaaaactgggtatcacatttgccgagcctgcggtgcggcatacctcggcagatatggaaacggaagagaaaaagacttcttatctgcttcctgtcatttatgccgtcttgatcctcctcgggattgcggcgatgatctatctgatcccgaaagtcacggcgcaggaaaaggcaaagcggtaaacggatcgcttgtgtttgcgggaagacagcccgtaaaataagaaaaaaaggaggagtttcatgcagttttttcttataacaggcgcgtcaaaaggcttgggccgggcgcttacggaacaggcgcttcaagaaggagccgaagtcgccgcgctttcaagaacgataagcggggaaaagcgcgaggggctgacagaatacagtgttgatttaaccgatctggcagataccgggcggcagatgaaggcgattcttgatcaagcagaggagaaggggtactccgctgtcacactgatcaacaatgccggaatggtggaaccgatcaagcgggcgaaagaggcttccgccgaagaattaaaccgccattacacccttaatctgacggcgcccgttttgctcagccaaatgttcacaaagcgtttcgaagcgttcagcggcagcaaaacaattgtcaacatcacatcgggcgcagcgaaaaatccttataaaggctggagcgcgtattgcagctcaaaagcggggcttgatatgtttacgagaacattcgggtttgaacaggaagatgaagaactgccggtccgcatgatctcattctcgccgggagtgatggatacagacatgcaggctgtcatccgttcttcgtcaaaagaagattttcatgacatcgaacggttccgcaatctgaaagaaacgaaaaacctcagaagtcctgaatacatcgccggcgtcattcactcactggtcgcgggcgagccggaaaacggacggatatacgatatcaaagaatttttgtagagcagcgttcacgctgctcttttttgtttgtacaatcacttcggggtccggcggcatatgatgaatgaaacaacgtataaggggtataagaaatgtatcagatgaattgagtttcttctcgatttatgttaggattctaaaaatataaataaggaggggtttccatgagaaatgtaacgttaatggatgtcttcacccatccaatcgcacaaaagtatttacagcgttccggtgtcgcacatgcgatcgcctgcgcgtttcatgcataccgtcttgccgtaaaagcaggtgtcagcccggatcttgcggcgaaagcggctttactgcatgacgtcggccattatgaatggtacacagacggcaaatgggattatgaaaagtacagaagaaacgatatccatgccattaaaggcgcggaacgggcgcataagctgctcatccggctcggtgaagaaccgaaagcggcgaaggacattgcgctggcgattctgcttcacaccgattcctatctgcctgaaggcgaactggacaagaatacgctccagcaaatcgtgaaacaagcggatgaactcgatgaagaacccggcggacatcaccattaccgccaaatggatcacacggccgcgctcaaacaaatccaaaagcttgatcagttaattgaccaagcccaatatcccataagaagctcagtctaggccactcatgcggccttttccgcttacataactccgcatgctcactaacaccttttccgctccgatagacgtactgtgtcaaagcctttgtccgctgcatatgctgaaggaaaacatagtaaaggggatcagcgaaaatggcccatcaaggaagcccgcaaatcgtctcgttagtggacccttacgtttatcagaccatccataagcttatcggctcaaggtttatcattcaaaccgtcagacgcattatcagaggacggctgattgatgccactccggatcacatcgccattgaagaaacgcatgaccgtgtattttatatcagaaaccgccatgtggtttccgtcatgcctgattataccgaacgcgtgtaacagcccgaataaggcgcaaaccggaggcggccctatagaaccccggtgcgtcttcttttttgagatacatagatgcacggcggctttttttggtacaatcacagtacaagttcacatgacaataggaggaaaccgcttgttgaaatcaaaggtccatttttggacgctgcaaattttgctcgttttgctcattatttacgtatcaacgaaagtctcgtttatttttcagccgtttttcggttttatcaccactctgttttttccgattttgatctcgggcattttgtttttcatttttaatccgatcgtgcgcctgcttgagaaaaaaatcccccggacattggcgatcctgctcatttatctcgttttcatcggcctgattgcctttatgttcaccgccatcggaccgattgtggcttcccaggtcacggggctgattaacaatttccctgattacattcatcagattcaagtcttgacggcgcaattatcccattccaaatggtttacgtggatgatgacgcaggattatgtgtcgatagaaaaaatccagcagtctctgacgggatttttacaaagccttccgcaaaatattacggcaagcctgtcggccgtgttcggcgtcgttacgaatatcacgcttgtcgtgatcaccgttccgttcattttgttttatatgctgaaggacggccggcggtttccgctcttggcggtcaaaatcctgccttcttcctaccgggcggaaggtcggaaaatatttaatgacttatatgtcacattggccgcctatttccaaggccagctgctgatttgtctctttgtcggaacggcatgctttatcggatattggatcatcggcctgcagtatgcgttaattctcgggatggtgatcgccgtcaccaatatcattccgtacctggggccgtttctcggggcggcgcccgcggtgattatcgcgtttatggattcgccggctaaggcgctgtttgccgttattgttgtcgttgtcgtccagcagcttgacgggaacctgctttctccgcttgtgattgggaaacggctcaatacccacccgctcaccattattcttctgcttatcggagcgggcagtttcggcggcattctcgcaatgattctggccgtgccggtttacgcggttttaaaagcttttgtcttaaatatcgtccggcttatcaaacttcgtcagcggtcaaagcttgaagacagccgcaagccgaaataaaaacgggcacaactcccgatgcagcgcataaaatgctgtaaagaaaagcggaggtgtgggtatgcctgcaattgtgggaccgatttatattatgagtttagccggagacgctgcggcgagcttcggtgacgtgtttgccatttctcccaaagccgttgaccactcaggcgcgggggcaggggcgtttcattccggagattttatcaaagtcactaataaattcagcaaaacgcgctttgaagacatcgatgtgtttgacgaacctgattggtttaacgcgtgacagcctccttttaggaggctgtcgcttttttgtagtataatagaatcagtctttataaaaggggaatttttatgaaaatcagaaaagcgaatattaccgtgcagtccggaatgatcggtgatgtatatctgcatgaaaataaaaaagaacagcatacccttgtagccgttccggaacttgagtggagcacgatcatttcctatgaggaagagaaaaaggcgctggcgcagcggcttttacaatcgttcagcaagctgattgaagaagagcccgccggagagctcgccggcaagatctcccattgggtggctgaaatgtaacgaagcggtttaccgcgtcccgtccggggcgataattgtaaaacaagctgaggagggacaggccgatgagcgacaaaacggttgacctttatttacagcaggggatgtacggccctctgcagacgaaaccggatgagcgccatttatttttaggctcgctccgtgaaagagtcatcattgccctgacgaaggggcaggtgctgcaaaagcagccgtatgaagaagtgaaacaggcgctgaaaagccgaaaagacgcggtgctctatataaacggaaggctcccgtatcatgcttattcaccatatatgaagcttgccgcacttgccggtgtccgaagctccgtcatttcggaccttcaattcgaaacgccgctcggcctggtttttgccgccgattatgccgtgaaccttgacggcatttacgttcaggatgacatttttcagcgctcactcctgaaatcttaaaagggcaaaacaccgtttgtcattttacaatgccaattcacttacaagtggagataggatataatggttttcatatgaatggcggggaggccggctatgaaaaaagcatttatatgcattgattatacgaatgattttgcagctgagaacggggcattaacctgcggggaacccgcgagacagattgaagatacgattgtcagtttgacgcaagcatttatagaaaatggtgattacgttgtctttgcggtagattcgcatgatgcagacgatgactttcatcccgagacacgcctgtttcctccgcataatatcaacggcacggagggcaaagagctgtacggaaggctatcgcctctttatgagaaacataaacacgcaaaaaacgtaaattatatggaaaaaacgagatattctgcttttgcgggaacggatttagagctgaaactgcgggaacggcagatcactgagctgcatcttgcgggcctgtgcacggacatctgcgttcttcacacggcggttgatgcctacaacaagggctttcagatcgtcattcatcaaaacgctgtggccagctttaatccggaagggcatgaatgggccctgtcccattttaagaacagcatcggagcgcaagtggcagagtaaggaaggggaaaacaattttggtggagcatggttttaaagacgacagtttgtctttacatacagatctttatcaaattaatatggccgaaacgtactggagagacggcattcatgagaaaaaagcgatttttgagctttttttcagaaagcttccctttgaaaacggctatgcggtatttgcgggcttagaaaaagcaatcgaatacttggagaacttcaaatttaccgacagcgatctgaattatttaaaaacggaattgcactatgctgatgatttcattgattatttacgggatctttcttttaccggatctctttacagcatgaaagaaggcgagctcgtttttaacaacgaaccgattatgcgggtcgaagcgcccctgatcgaagcccagctgattgagacggctctgcttaacattgtgaattaccaaacattaatcgccacgaaagcggcccgcattaaaggcgttgtcggtgacgaagacgccctcgaattcggaacacggcgcgcccatgaaatggatgccgctatgtggggagcgagagcggctctgatcggcggcttcagcgcgacgagtaatgtaagagccggaaagcgttttaatatacccgtatccggcacgcacgctcatgcgctcgtacaagcgtaccgcgatgaatatacggcatttaagaaatatgcggagacccacaaagactgcgtgtttctcgtagatacgtacgatacgatccgttcgggtatgccgaatgcgattaaagtcgcaaaggaattcggcgaccggatcaacttcatcggcatccgtctggacagcggggacttggcgtacctgtcaaaaaaagcgcgtgaaatgcttgatgaagcgggtttcacagacgcaaaggtcattgcttcaagcgatcttgatgagcacacgatattaaatctgaaatcgcaaggagcgaaaatcgatacgtggggcatcggcacgaagctgattaccgcatacgatcagccggctctcggcgcggtttacaagcttgtcgccattgaagaggacggcaaactgaccgacaccattaaaatttcgtcaaaccctgaaaaagtgacaacgccgggaagaaagagagtataccggattatcaacaagctgaatcaccactcggaaggtgattatatcgcgctttatgacgagcgggtaaatgatcagaaacgcttaaaaatgttccatcccgtccacacgttcgtcagcaaattcgtcactgatttctatgcgaaagacttgcatgagccgatctttgaaaacggcgttttatgctatgataatcccgaaattaccgacatccagcaatatgtgcaggataacctcaaacttctgtgggaggaatacaaacggatcagcaagccggaagaatatccggtcgatttaagcgaagactgctggagcaacaagatgcagcggattcatgaaatcaaaagcgagctgaaacgggaacttgaatagaagacaaagcggcctttcctttctctggaaaggcctttttgttgtgataatatttttcacatttagacaaatttcgtcaagttatttgatatacttatgttcgaaggccgcatctaagggggtaaatgaatgaaggtgtttgttgcgagacagcctatcttcaacagaaacgaacaggttgttgcttatgaacttctttaccgggagagcgaagagaaccgttattcggccgctgacggagataaagctacgacggatctcattattaacagctttatcaacatcggaatcgaaaagctgactgaggggaaacgctgctttgtgaattttacagaaagcctgatgttttcagatctccctacctcctttgatcctgaccagcttattatcgaaattcttgaggacataccgatcactccggcactcatctcaagatgcagacagctgaagaaattaggatatacattagcacttgatgatttttacgccatcaatccggaaaatgaagagttagtggaacagctgatgaaatatattgatattttaaaaatcgactttttgcaatcctcgcgtctggagcgcaaaaaaatcattcagacgtacagctgtaaaagtctgatttatttagcggagaaagtggagacgagaaaagattataaacaggcggccatagacggctttcacctgtttcaaggatattttttcagtgaaccgcgtgtcatcagcggaaatgatctgacgtttcattttcattcttactaccagcttttaagcgaattaaacaatgaccagcccaatatacagcgcgtgacggaatacatagagcgggacgtcagcttatcgtatcagattctgcgttttttaaacggatcgcaaacaaggctgaaaaaaaagatagacagcatccagcaggccatcatgatgctcgggctgaatgagattaagcgcttgatttacattctttcattcagagatttaacggcgaaaagccactcaagccaaaaagaaatcattaagatttccttaatcagggccaaactgtgcgaactgctggcgaaaagaaccggaaggccccagccctcttcttacatgctgatcggcatgttttcgctcatcgatacgcttctccacagggagctggaggatatcatcaaagaactgcctttaatcgatgaagtcggacaggcgctgctcggttatgaaaacgattattataagatgctcgcgctcgtcaaggccattgaatgcaacaactgggactgtgacgagtggggaaaagaactgaacaaagaagaagcgtatgactgttacttacaggcgatcgaatggtgccggcagctgatcgtggattgagccgctttaagccgaccacctgaaggcgatgataaaccggctttgctctctgaccagactgacacggatgccgtcgggattatacgtcacgtcaaagtcatttttgatgccggtctgcttaatgagccgcttgaccgctgcggtgtcagaggattgcgctgcggtgaggatgcggcgtgcaagctcttttgacgccgtcagccgcgcaaggagcaggcgcgcatcctccagcatgcccgcagcttcatttgcggacgctgtcaaaatatctgcgtgaaccgggggactgggcgctggatgccggtatggcgcggcgaaaacagggcagcatggatacacataatgcatacggcggcctccttcctgagaaaacattcgttatacatgagtataggcggcgtgataatgagttatgacatgcaaaaagaccacaatgcgggggttgaggtcttttcggtgtttgtcggtggttatgcgacgctgttcgcccattctgttttgaaattgcgacggcagggactatagtccttgccggtttgtcggaaaaccgttaaaaaaacagcagaaccgccagattggtctgcttcatcctaaacgtctgcctttctggtagttatatagtcctgttcgctaaatgctccattcgggactatgggattaccccggtttgcggtgtcacgcagatacttttacacatacttttcggtgaaaaatcccgcaaaaacgtttacactattagtaacagatcaaatacctaggactcgttcaccatacacaattcattgatctttcaaaaaaaggagtgtggaaacggtggaaaacaaattagaagaagtaaagcaattattattccgacttgaaaatgatatcagagaaacaaccgactcattacgaaacattaacaaaagcattgatcagctcgataaattctcatatgcaatgaaaatttcttaaaaagacttggaaacaagtcttttttttgtgcatttgttatacaattaatggataaagtattatatgattgttaaaaaacaataaacatgctgtatttgaacaaaagggtttagtaaaataaagtgagggattcatatagctaagaaattaactctagaagcagaagatgtaaaggacacaataaaccatattctcaaaaaaaatgatgtgaataaagaagtaagtaaacatgttttgaattttgctgatacaaaaaacaactttccatttgctgagttagctttagatcattatttggcttttggagggaatgattttgaagaaatactagatttaggatcagggattgaactgcttatcttagcggctgatatttttgatgacatacaagataaggatcgtccaaatgcagaatggatgaaaatggatcaggctgtatctttaaatattgcaaccttaatttatacaatagctctccaagttatatcatctcgagatccggaagggttattactcaagacagctctaaaatatacagttcaagctatggaaggacaacacattgatttggtcgataatactttaactgaaaatcaatgcattgaaatgattaagaaaaagtcaggggctttgacagctttagcaagtatgctgggtgctgtacttgcaactaaacgttatcaatcagatgtggagcagtatgctttctatataggggttgcagctcaattaaaaaatgatttatttgagataatgtatgtgaataatacggaaacctttttcaaaaagacaaatttggcaattcagttcttagagaaaaaattcaacacagtatccacagaattgttaaacaacaactttcaacaatcagagttaaaacggcttctcttagaatctggtgttatccattatatgtcagttatgattaatgtatataatttgaaagtgaaaaatggactcgaaaatttaaatttgactttagagaacaaaaactatttaattaaaaaaatttgcgagaatgagaaggtggataaaaatgcaggaaatagtaaattatttagttcgtaatcccgaaattgttcaaaaattgagaagagaagaagtcagtatcataggtttagataaagaagaggtgaaaggggtattgcttggatttgatcaattaatctcaatgagttcaaaagacgagatatattggaaaccgtcatgaaacaggggtaaatatgaagttatctaaaaatacgtattccattttattaattttactcagcttgtcttatattttctatttaacttatataaatgtaaataatttatttgtaggagccaccgcaaatgttaataacaagaatcaaatagagattaccaaagtatcagattacacaatggcttattatgctggtgttaaaaaaggtgacattgtaattaaaattaatcagaataagagcgttgaaccaaaagatttaaaacaaaatacattgaaaaacgtaagatctatgacagttgaaagatctggtgaaatagttgatctcaaaaatttaagtttattaagtgaagacaacttatttgtttatttaatacctgttatttttttctttgtatgccttagttgtattatccttattttaaaaattaataaggagcaagattcagtttcagcttttatattgatcatctttttactcactactggtatagcatatgtaagtgcgggaggttcatcaaaaggagatataataagccgatacgtaaatgtcataactttaatatccgtaccggtaaattatctcttgtttatttaccaatatatcaaagaatttggatacaagatttttaacgggaaagtttttgttgctttatatacagtccctgttattaatataatactagagttttttaggcattgctttgaaagaggagtagttgggaaagttaatttagtatcaatatctctcctttatttaatagctctatttttcattactgtaggtttaataaagtacaaaaaaacagagcaagcaaatattcttaagacttttcttttaattaatatttttgctttctcaccatttgtattcttgtatgtggcaccctacatcatttttaatgactattatgtttcttcttttttagttgcgccttttcttttattaattcctttttctttagtttatcaatttatgactaataaaatctatgaaattgattttattattgggcggttgaaatattatagtcttttagctgtcactcctactttacttattattacaatttatgatcttgtacaagatccaaactcagagttttatacgtttaaactaactttgctgacatatattattatgttggctgtgttttattcaaaagagatcttagattttcgtttccgtttaaagcgtttttctgaaaaacataattatcaggacagcatattcaagtttactcaaataattaaaggagcttcatccttaaagcaagtattcactgaacttgaatctactctacttgaagttttgatggttagtaaagtatgtgttttagaagtagaaggagacttaaatgtaaggtatttttttaatgataatgagaaaaaattatgggagccgtattctcatcaattagctgaaacgacaagcgaaattggcaaaatagttcaagtggataaagggtttttaatgaaaataggggaacggggcactaaatcatacattgtactgtgtttatcatttatgaatactccgaaactaacttgggatgagatttcttggttaaaaaccttatcattctacaccagtattacgatggagaatgtgcttaaaatcgaagaacttatgaatcatctcgaagatttaaagaaacaagagacaaacccggtctggctcaaaaagctgatgtttacgatcgaggaaaagcagcgttcggatttggcccgtgatctgcatgattcagtgctgcaggacttgatttctttgaagcgccagtgtgagctgtttctggccgattttaagaaagaggagccttgccagttagaggtgcaggacaagcttcatcagatgaatgagcagatgtcggatgtcattttgatgacccgggagacgtgccatgagctgcgtcctcagctgctgtatgatttgggtctggtcaaggcggtatccaagcttgccgcacagcagcaggagcgtgcgccgtttcatatccgtctgaatacgggccggtttacggcggcgctggatttggatacgcagctgaatttgtaccgcatcattcaggaatttctttcgaacgccatgaagcattcacaggcgaatgaggtgctgattatgctgatcagcattcaaaataaagtgattctgcattatgaagacgacggtgtcggctgcaatcaggaagaaggcggcgggcagtcgatgagcatggggctttcgggtattaaggagcgcgtccgtgcgcttgacggacggatgaaaatcgacacaagtgaaggaaacggttttaaagcggatattgaaatggaattgtaaccaatttatcaccaaatcgacttggcagaagccaagtctttttaataaaatggaaatgagtgagtaaaagggaggaaaccatgaaaaagatactagtgattgatgatcatccggctgtcatggagggcaccaagacgattctggaaacggacacgaatctttctgtcgattgcctcagtcctgatgccagtgaacaatttgttctccggcatgatttttcagcttacgatctcatattaatggatttaaatctgggtgatgacatcagcggcatagagctttccaagaaaatcttaaaagagaatcctctctgtaaaatcattgtctacacaggctatgaggttgaagattattttgaagaatccatccgcgcgggcctgcatggcgccatcagcaaaaccgaatctaaagagaaaatcatgcaatacatatatcacgtgctcaacggacagattttagttgatttctcctatttcaaacagctgatgacccagcaaaaaacaaaaacgtcttcttcccctcaaagtgagcaggatcggttaaccccgagagagcgccatattctccaagaggtcgaaaaaggtttgaccaatcaggaaatcgcagatgcgcttcacttaagcaagcggtcgattgaatacagtctgacatccatttttaataagctgaatgtcggctcccgcactgaagcggtgctgatcgccaagtcagataacgtactataaatcttgaagggagaataacctatgaatctgaacaatacattgctcggcgcactcggtattgaaatcactgaaaacacgccggagagatgcgtggcggtgatgccggtggataagagaacggtgcagcctttcggatatctgcatgggggcgcgtcagcagcgctggcggagactgttgcaagtgtcggggcccagcattttattgaccggtcgaaacaggcgtgtgtcgggcttgagattaatgccaatcatttaaaatccgtgaaagagggcgggacggtcacggcaatagcagaacccgttcacacgggcagagcaaccattgtgtacgggattaacattttcgatgaacgggaaaggctgatctgtgtttcccgctgcacgctggctgttataacaaaataaacaaacagccggaaccctgaatcgtccggctgtttgtttttacaaatatgaatcttcttttcgtttgatcacaaagtttctgatccctttgtaatcatcctgaacgcttcttttatcaagcgccgctcccgaattgtacgcggccctgcatatgaggtgcgctccgaccggcgccgtcagcaggataaaaatgatgccgagcagtatttttacagaaatttctccggtcagcatccacaagtagcctaacaccccgagcaataccaaattaacgccgagtgtcgagccttttgaagaggcgtgggcgcgcgtatacacatcaggaagcctgagtgtgccgaaagacgcgaccaggcagatcagcgatcccatcagaatacaaatgccgacggcccatttaacgatttcgatcattttcgataatctctcctttctccaaaaacttagcaaaggcaatcgtgccgataaacgataaaatgccgagcagcagaatgatgtccaaaaaggccgatgtgtttaagagaatggatacaagcgcggtcatggcaatcagattaatgccgatcccatcaagcgcgacgacccggtccggaaccgtaggaccttttatgacgcgaatgacgtacagaagagtcgagaccgccataatgccgagtgataattgcagaataaacgtaaacatcagcggctcacctcctgaatggctttctcaaaagagacgcggatgtcatggatcgctttctccgcatcttcaatgtccatggcgtgtatatagagaatcgaccggtcatcggagatatccatcacaagcgtacccggcgttaaagtgattaacagcgagagcagcgtgatctcccaatcctccgtcaattccgtcttaaacgcgaaaatgcccgggcggatgttcagtttcggcgatataacggttttcagcacgctgacattggccaaatataattcctttataaagatcagcgccagtttgatgactgaccatattttccaaatgtaaaacggccgcgagaagaagcgccggaaaaaaaacagcgccgccaagcccgcgataaatccggtcataaaacccccggcgctgaggctgtttgtgagaaacatccagcaaacagcgagaagaacatttaataatagttgaaaagccatgccatctactccttcaaaacagcttcaatgtatttttccggattcagcagattctcagccgtctgattgacatacggtgaaacccattcggttccgagcccgaacagaagcgacaaaaggagaaaagcggctgccggataaagaagtccttttgcggaacgtccgcctgcgcccggaatttctttttcttccccccaaaaagccgtcgtaaaaaccttcagcacggaatagagcacaagcaggcttgataagagaatcaatacggaaaacaatgtttcccccttatcgaacccgccttccgcgatcttcagcttgcccacaaatccgctgaacggcgggatgccggccaaagatatggctgagataaagaacatccatcccaaaacgggataacgggtgatcagtccgcccattttatgcaggctggcagtgcctgtcaatgcgataagcgtgccggcaagcataaacagcgctcctttaatcagcatatcgtgaatcaagtaataaaccgctccttgaatggaggccggcgtgttcatggcaatgccgaacaaaatcacgccgacggctgtaataatattgtagatgacgattttcatgacatccgaaaaggcgatagatccgattacgccgaatagcaccgtcagcatcgcaagccacatcatcaattggtgggtaaagcccgtatcatgaataaagatcagggtgaatactcttaaaatggcgtacaggccgactttcgtcaaaagagacccgaataaagccgaaatcgcagccggcggggcgtaataagagcccggcatccagaaatacagcgggaatatcccgccctttaaaccgaatacaacgagaagaaggacgccgatgacggtgatcagcccggtctggcccgattcgcttatttttacgcttagatcagccatattcagcgtgcccgtcaccgcgtataagtaaccgacgccgatgacaaaaaacgcggatgacacaatgttaaacacgatatacttcaatgattctcttaattgaattttcgttccgccaagcacgatcagcatgtaggacgcgataagcagaagctcaaaaaagacgtacatgttgaacaggtcgcccgtcaaaaacgctccgcttacgccggccagaagaaactgcacccctgaataatagaaagcgcgctcccttttttctccgatggagcggaaggagtacaggatgacgagcagcccgattatggcggttgtcaaaacaagcagtgcggcgagctgatccgcggcgagcacaatgccgtacggcgctttccagccgccgagtgtcagcgtctgaatcccgtgtgtgaaaaccgtctgaacgagagcggcgctgatgacgatggaaacacaggaagcggcagtgctgaatatccgcatcagcatcacgcgcctgttcataaaaatcagcagcactgcggcaagcagcggcaccaggataggcaatatcacaaagttattcatgttgatcatttcccctcattcgatccatttcgtccgttttcagttcctgataggcgcgaaacgccatcacaagcaaaaaggacgtgacgccgaacgaaataacgatcgccgtcagtatgagtgcctgcggcagcggatcgacaaacgacgtgctttttccgcccagtatgggaggagcgccttttttcagtccgcccatggtcaggagcagcaaatggacgccgtggcttaaaagcgcggtgccgataatcacgcgcagcagacttttagaaagcagcaggtaggttgccgccataaacaaaataccggcaatgacagacattaagatttccattattcttcctctccaatcgtttgaataatggtcatcgtcacgccgacaacaacgagatacacacctaaatcaaacaaagtggccgtcgcaagctccgtattcccaagcaccgggagatgaaaatggccgaatgtatgggtgagaaagggtgctccgaataagaacgaacctgcacccgttgcaatcgcgataagcagacccgcgcccgccacataaataaaattgacgggcaaaatcgatttgacggtttttaaatcaaaggccaaaagcaacagcacgatggccgaagacgtaatcagtccgccgacaaatcctccgccgggagcgttatgccccgataaaaataaatagaaagagaaaagcagaatgataaaagatacaagcttcgttgccgtctgaaggatgatgtcgtttgttttttgctgtctcaacgctcttctccctcctcttttactttcgttctgatcatgccgtaaatcccgagtgcggcaatcgacagcaccgtgatttcaaacatcgtatcaaatcccctgaaatcaacgaggatgacgttgacgatattgtttcctcccccgagcttatggctgtaagcggtgaaaaaggaggagatgctgtcttttgttttttcgctggaagacgcgattccgagcattgtcacgatgacgccgacaccgagagaaatgataaaattcgtcatccggaatgttcttgtcttctttttccgccgcattttcggcagatggtaaaaacaaagaagaaacaaggcgacggatatcgtctcaatgactagctgcgtgagcgccagatcgggcgctctgaaaatcacgaaaaacagcgcgagtgtgtacccgacaacaccgagtgagataatggccgtcagccgcgatttggcgaacacagtcgcaatcgttgcgctcaccataacgagggacagcacgatttcatacaggccgatctcagccatgcctttcgctgtcatggaaaagccgcctttcatcacgaacgccgctccgatgagaatgataaacgccgcaaagatatacagcagataatcccgcaaaaatccggtcatataagatgacgtcagctggtaagatcttttttccatactgcccctcaccgcatcgtaaagcttgttcagcgtcagttttttcggaaacagaccgtacaaacgctcccatttagacagcgttacgtaaccgatcgtgccgacaatgataatgccgagggtcatcattagctcagccgtcaccccgtgccactgggaaatatgaacatgaaatgtatctccgccggttaacagagccggataaatggagttcatcgccggttcaatcaggctgtaagacaaaacgttcggtgcaaaaaacagactgacggcgcaagcggcaagaatgaccggcgaaatcagcatgccgagcggtgcttcatgcggcgtcttttcaagctgatcaggtttgcgcgcgccgctgaacgttctgaaaaacagcttcatgctgtagatgaaagtgaagacgctcccgatccatgcgagaacggggaacagcacgccccacgtatccaggctgaaaatatctgcatgagcaatccgcagcatacttgtaaagaacatttctttacttaaaaagccgttaaacggagggaggcccgccatggaaaacgttccgatcagtgaaacggtgaacgttaccggcataagcgccatcaggccgccgagcctgcggatgtcccgtgttcccgtttcatggtcgataatgccgaccgccataaataaacttcctttaaaagtagcatggttaattaagtgaaacacagccgcggtgacagccgccgtaaaatactctgaatgctggtaatgaagcgcggcggctcctgcgccgagcatcgatacaatcataccgagctgactgactgtggaaaatgccagaatcgcttttaaatcggtttgtttaatcgcattgaaggaagcccataccatcgtgatcagaccgactgaggcaaccgtccaaaaccagacgggtgaaaatgcaaaaaccggactgaatctggcaatcacataaatgcccgctttcaccattgtagccgagtgcagataggcgctgacaggagtcggcgcctccatggcatcaggcagccagatataaaacggaaactgcgctgatttcgtaaaggcccccaataacaggagaaccatcgccggaataaagaatggatggcctgcgataatatgcacctggttgaccatttccctgatactgaaagaatccgtcatcagatacagcaggataaagccgccgagcatgcacagcccgccgccgacggtaatcagcagtgacttttccgcaccgtagcgtgatttcttccgcttatgccaatacccgattaataagaaggatgacaggcttgtcagctcccagaacatataaagaacgataacgttatcgacgagcacaacgccgagcatcgcgcccataaacatcagcaggtacacataaaaggggccgagcttttctttgtccttcgataagtaaaaaatactgtaaagcgtcaccaaagagccgatgcccgtaatcaataaagcgaataacagcccgagtccgtcaatataaacggtatagttaataccgagggacggaatccattcggccgcataccggacggtttccccagccattgtgacagggagcttgctgataaagtaaacaaacagcacaacgggcactatcagcacaaaccagcctgtatggacttgttttacccgtttataaagaaagggaacgataaatgcaaataaaaaaggcgccaaaatcgcgaaatgtaacagctgcaacagaagacctcctttgcttgttttttcatcaagcaactgctttatgtaagagtgaatcaatcaattcacggtcataggacccagtacaaattatatcgcacttttttttaccctgctacggcataatgtattcctttctgtgtttttgtggtcttttgaacccaaaataaatttatcaaatatcctgatctttgtatatacatttatctttcagatcaagcttttaaaaaaggagctgatcagatgaagagaaaggcggcggcctgtattggaatattttgttctattattgcaggaacattcatagcggatgatttctgcaaagagcggcagcagacggaggtagatgaatgggagcgtttttttctcggtgcggaatacgcggaagataaactgagtgcggctgaatcaatgcaaacaccgtttcagccgcgtgagtatatcagaatcgtttatagatgaaaagagttccggcgccggggcgcggaactctttttttgtggtgatcagcgttttcctttaatgtaagggatgccgttggctttaggcgcgtccgcgcggccgatgaagccggcaagcgcgagaatggtcagaatgtaaggagccatcagcatgtatacattcggaatgtctttgaacaggggcaaaagcgagccgataatgctcaaactctgcgcaaacccgaagaacagcgcagccccgagcgcgccgatcggatgccatttgccgaaaaccagtgcggcgagagcgataaagccttgcccggaaatggtggagtgcgtgaaatcaagcgcgatcgtggaagcatatacaccgccgccgagcccgccgaacagcccgctgatcatgacgccgatatagcgcatgccgaacacgttgattcccatcgtatcggccgccatcggatgttccccgacagaacggatgcggaggccgaacggcgttttgaataaaataaaccaggaaacaaaggccagtacgatggctaaaatcgacgtataatatacgtcggaaaagaaaatctttcctaaaaccggaatatcgcttaacccgggaatgttcgttttgtaaaagggctccgggattttatcagtctgcgcctttccgtagatcagcttgacgataaacagtgtcgctcctaacgcgagcatattgatcgccacaccggttaccgtctgatcggcgcggaaagaaaccgcggcggccgcgtggatcagtgagaacagtccgccggcaatcattgccgcagccaaggcgagccacggagcggcggcgccaagctcgcgtccgaaaaataagttgaacatgacgcttgtaaaggcgccgataatcatcagtccttcaagaccgatgttgacaactccagatctttcagaaaacacaccgccgagagcagttaaaataagcggagccgcatatacgagtgttgccgggacaataatggataaaatctgcaggaagtccacttacttcgccccctttttcttcaatttatcaaggatgagacggatggcgtagcttgatgccacaaacaaaataataatggcgatgacgatgtcaacgacttcagaaggcaccccggattcaatcggcatatttaatgccccgactttaaggccgccgagaagacatgccgccagaaccacgccgattgccgtgctgccgccgagaagcgcaaccgcaatgccgtcaaagccgacgccggtaaaggcgcccttaaccgccgcgtattgaaaggttccgagtccttccatcgcgccggcaagccctgcgaaggcgccggaaatcatcatggcgtacatcatattttttctgacgctcattccggcgtattgtgcggcgtgctggttaaagccgacagcccggaattcaaatccgctttttgttttatgaatgataaaccacatgaggactgccgcaaacagagcgatcagaatgccccagtgaaggcgggagtaatctgtcagctgctctaaaaacggcgagcggagcgacgcgctttcatgaattttgtctgttttgtcccggtggtccgtcatgacatcggaaatgagataattggttaaatgaagagcgatataattcatcatgatcgtgacaatcacttcgtggacaaaaaaacgggcttttaaaaatccgggaatcaggccccaaatgccgcctgcagcagcagccgccaataacgaaagcggaaggtggatgtaagcgggggcgtcaaaggaagcgccgacccacaccgcggcggtccagccgacaaggagctgtccttcaaccccgatattaaacaggccggtccgaaatgcgaatgccacggccaatccggacaaaatatatggcgtaatctgccggatcgattccccgatgtaatacacttcaccgaaaatgccgctccaaagagccgaatacccgcttacgacattgtagccgctggcgagcatgatgaccgcacccgcagctaacccaaggatgatcgcaatcagcggcacagccaggtgagaaagtcgattaatcatgtgttttccccgcctccatttgcttacttcccgccattaaaagtccgagctcctgctcgtttgtttcaagcggattgacgtttgcgatgatgctgccttcaaagatgacggcgatgcgatcgctgagattcattatttcatcaagttcaaaagataacagaagcaccgctttaccggcgtcacgctgctcaatgagctttttatggacgaattcaatcgcgccgacatcgagtccccgcgtcggctgggccgcaattaaaagatcaggatttctgtccacttcccggccgataatggccttttgctgattccctccggagagcgcgcgcgcaggcgtatattcatcaggtgttctgacatcgtattcttcaatcaggcttcgcgctttgtcataaatcgtgtgtttatttaatatgccgaaagaagagtagggcttttggtaataactttgcagcacgatattttctccgatcggaaaatcaaggacgagcccgtgtttatgcctgtcctgcggaatgtgcccgatgccggcttcagtgactttcctgggcggcatgttttgcagctgtttgccgtttaacgtgatcgtgccggcattcgtttttctgaggcctgtaatggcttcaattaattcagactggccgtttccgtcaacgcccgcaatgccgacgatttcaccggctctgacagagagggagagctgcttgaccgcctcaacgccgcgcgcgtccttcaccgttacatcagaaagcgaaagcacttcttgtttcggatcggccggctttttatccgtcttgaatgacacttcgcgtccgaccataaggcttgccagttcatcttgatccgtatgtgcgacatcgagtgttgtaatgccttttcctttccggataatggtgacacggtcgcagacttccataatttcttttaatttgtgagtgatgaggataatcgattttccttcattgacaagatttttcataatctgaatcagttcttgaatttcgtgcggagtcagcaccgcggtcggctcgtcaaaaatgagaatgtcggcgccccggtagagggtctttaatatttccgcccgctgctgcataccgacggaaatatcggcaactttggcttcaggatcaatgtgcaggccgtaacggtcggaaatatcgcgcacgtcccggtcggcgcgctgtctgtcaattcggccgaatgttttcggctcttttccgagaatgatattttctgagacggtaaaggtgtccacaagcataaaatgctggtgcaccatcccgatgccgagatcgttggctttgttcgggctgttgatgtgaacgcgttcgccccgcacccggatctcgcctttttccggctgatacagaccgaataaaacgttcatgagtgtcgattttccggcgccgttttcaccgagaagggcgtgtatttcgccttttttcacttgaagcgtgacgtcatcattggcgacgattccgggaaactccttgcgtatattcagcatttcaatgatataatccaccgatttttgtcgctccttttcagagatactttgatgagaaagagcttggcaaaagaaaagctgcaagagatgcagcttttccttcaccgctcttttcataaaagagaggggataagcacggaagtctccttatcccctggttcttactcagccttgaaggatttcaattctttttcagttgaagggatctcgagtccgtccgcgattttcttcttccaatcgtctgttgctttgatgacatcgtcagaaaggttctccttgtgatccgagatgccgactgcatcttgcgccaaaccgtatgttaatgttttgccgcccgggaatttcccgtcactcgcttttttcgttaagtcctctacggctgtatccacttttttgaccattgatgtcagagtgacattgtcttttgtgcctttgacttgaccttccgcgtactggtctttatcaacaccgataacccatacgttccgcttcggatcttcttttttcagatttttcgcttctgtgaagacgcccgttcccgttgcgccggccgcgtgataaatgacgtcaacgcctgatttgtacatgctttcagccgtcgccttgccgacatcggctttgtcaaatccgcccgcatatttcacttcgacggtcgctttcggatttgcggcttgtacacccgcgcggaagccgatttcgaattttttgatcaattcagactccattccgcccacgaatccgacttttcccgttttgctcgatagcgcagcggccgctcccacgaggaatgaaccttcctgctccttaaatgtaaggctcgccacgttgtcttttttgacaacggcgtcaatgatcgcaaaatttgtgtctttgcgctgatcggcgatttcgctgatggaatcctgcatcagatacccgacgccgtaaatcaggtcaaagtgctcccgcgctaatttatttaagttcgttgtataatctgcatctgattttgattgaagatagtcaaaaccgcttttgccttttgtaagcccgttgtcttttccgaatgcctggatgccttcccaggcggactggttaaatgatttgtcatcgacaccgccgatatccgttaccatgccgacggtaaagtttttgctgccggagccgtttgctttgtcacttgaaccgcatgcgcttaatatggttccggccgccgcgatgagcgccatcgccattccgattttgcgttttttcaaagatataacccccctgtaaaatatggctgtgccgttcaattcagtcttgagtccccgtaccggatgcggaatcgaaaaaactttctgataataacgatgagacgtctctctttttcccgccttaagcggctgtctcttccaggttcgggacttatgacttacctgaaaagatctgctaaccaatcataatttatcattttacccgccataaataaatagaaatttgcttattttttaaaaaatatcaattttatgaatcgtcttcctcatctggataaaacagaggaggatcagccaggtcattatccttatatagcatacaaaaaaggaatctcaagccttttgtcacgggatatgacagtaaaaaagcaccgttcacagcggaacggcgctttttgacattataaatattgtttgatgctgctgacattgcctgtgttgatatggtattgaaagacgggccttccgattgtgccgtacgccatctctacattcagcacttgaatgtcttccagaaatttaagatacttccggatggagacttgcgagatttcagtatgcttggcgagatcttccgtagtaaaagaactgtcgccgaaagactcaatgctcgcccagatgagtttaagcgtgctctttgtcaatcctttcggaaggtgaaccttttccgccgcttctttcttttgaaaaagctcggcatccaattctttctgtgtcatgcttctgtgtgattgataaactttctgcttgcgtctgtagtcggaaagagcggtttgaaagcggtcaaattcaaatggtttgattaaataatcgacggcgccgtaccgaagcgtttttttgatgacgtccagctcgcttgcggccgaaatgacgatgacatcaaccgattcattctgcttgcggatttccgttaaaagctcaagcccgttttttcccggcatgtaaatgtcaagaaggatgagatcgatatgatgctcgctcagcacgtgcagcgcgctttgaaaggatgatgcgatccctttcagctgaaatccttcaatctggctgagatagcgcttatttaattcacccaccatggggtcgtcttcaactatgagtacattaatcatcattttcctccttcggttcatacggaatgcgaagactgaaagtcgttccttcattcttttcacttgtcacaatcatatggccttttaaattttctgttgcctgctgggtgaaatagaggccgaacccccggtttgtccctttcgtggaataaccttgttcaaaaatacgggcttggtctgccgcagacattccggctcccgtgtccgtaatctctatatcaagctggcgatcctgaaaccgcatcgagcacgtaatgttttttttcggcatctgcgccaccgcgtcgagcgcgttgtttaacagatttccgataatcgtaatgagctcatggatgacggccggatctgccgcattcgggatcaggctgccgagctgaatgtccagatcagcgccctgctcgcgtatgtagctttgttttcctagaagaaaccctgcgagaaccggacttttgacatcacttataatctcgcttgtttccgtcttctgctgaatggcaatgtctttaatgtaagtgccgagatcatcgtattcttttaactggacaagccctaaaatgacatgaagcttattcatgaattcatgagactgggctcttaatgcgtttgcatacattttaacaccggacagctgttctgctaaatgtttgacctccgttttgtccctgaacgtggcgatcgctccgacggtttgtcctttcagatgaatcggaacctcattaaagaccagctcaagtccgttaatgcggatatccctgtcctgaagcggttttttcttttcaatcacctgtttcagcctgcttttcgggagaatatcgttcacatcttgatcgaccggattagtcggaatacccattttaataaaaagccgtttcgcttccgcattggcgagctttatttttccccgcgcgtcaaccgccagaatgccttccttcgttgattcgagcatggcgctccgctcttccaggagggtggcgatttcataaggctcaagaccgtacataatgtttttgacggtgcgggcgacaatgacggctccgatgacgccgacaaaaatacttacgcagatgatgaaataaagcggtctcaaactgtggctgacgacatcctgtattttgttaagcgaaattccgaccgaaacgacgcccacttgttttttatcttttccatagatcggtacgaaggctctcatggattttccgagcgtccccgctgatgtgctcgttttgatatggccgtgcatcgccggctgttcgtctccgccggtgaatttcttcccgattttatttgcgtcggggtgggtgaggcggatgctgttcatatccatcaccacgacaaattcggttcctgtcgtatgctggacgtctaatgtataatcccggagctctttcagcccttttcttgtttgcaatgcctgcgcgacactcggtgtttccgcgaccagctttgcggtgcgcagcgcggttgtccgttcttcttctttcacgcggtctgctgtttggacgctgatcgtgaaaaaggtgatacaaagtgcgataaggacgacaatacagacgaatatcgttaatcgggtttgcaattttaatgtttttttcataacagccttccttacgtttatcattcccgcgttctactttactccgaaaaagccggtttgtgaagatcaggcccttatttcgtaaaagtgaggaaaaatggtattttttatcttgtcaatgtgttttaagtcctccataataagtgaggtagattacagaaagggactttttatatgaaaaatacttattggacgggttattttccgctcgttgcgattctgctttttagttcgtcattatccatttctacctcgctttatgtcatgaagatacttcagacgctcggcatgtatcaggggatgctggattatttctctgagaaagggatcagactggcgctttttgcagcgttcgcccttgtgttttttatgctattttcggctttgaagctgattgcaaacacagtgacagagctgtctcttttgtttttcacaaatgaccctgagggggacaatctgaaaaaaatcagattaggctctttaatttatgtaggcggaggaattctttcctttgcgctcgtgcagaatggtttttggattgcggcgttatttgccgttgttacgctcgtttatttgattttcatggtgtacagaatctattcgacactctctatcgtttcgctgatcggttttatattgcttgaaattttgttttggtttacttttgttatcggtattttgtacatctttatcaagctttataatagcataatggctagcttacctgtgtaagctagccatttttgttaagacagaaatctatttttgatctcaggggaggggagcatgcatgcttccctttttccgaaccatttgtaacggcgccgggcgatgaaagaataggctctgtccctgagggggcggggcaccgcgaaaaaaaccgctgacagccgccaggctccgcggagatgacgggaaacttttaacacggctgcggattttttgtatatccgcccgttctcgataaaaatcatgctgtcaaattgttctgtcggaagtccttctgatgccaaaagctcccgggcggtatctgattgcaatgaagcaaatgagattttgccggccggatcgcgtttaatgatgaattgaacggcgccgttgcataagttgcagacgccgtcaaacaaaagcacgcggtccggaagctgagctggtttcaaagcggatcccctccgttatctttaataagctgcctgcagcgtgtttttccagatcgaaagctgagggcttgcgtcatgaaggtattcgacgcttgacggtgtatcctttccgacccatacccccatcgtataagcgtccgtcaggccgacaaaccacatatcgtgatagtcatttgacgttcctgattttccgccgacgtacggagctttaaagttcgctttttttcctgtaccgcttttgacgacggctttcatcatttctttgatctgcatgttggtccgcacgctgaatacctgcgtcggctcatctttccattttaatatcgtttttccttttaaatcagtcacttttgtaatcgcgtgactcggcgtataaacgccgttgttgccgaacgtggtgtacgcattggtcatttcaagcggcgtcatgccgtttgtaaaaccgccaagcgccgcgggcagacggtaatccgcgctgaccagcttcgcgaaatgaaacggttcaaggtagctgaacgccttattgacgccgacgcggtccatgattctgatggccggtgtgttgtacgagtatttaaacgccgtttccagcgtgaccgtaccgtacgtgcggttattgtagttctgcgggcagtaatccgcactgcagaatttgcttgcgtcaatcttgctgtgtggcgttgcgccggtcttttcaatgtaaggtccgtaatcaagcagcggcttaatggaagaaccgggctgtctgtatgcttgataggcgcggttgaaatcatatttatgataatctttcccgcctgaaagcgcgataatctgatgtgtctgatgattaatcacggccgctccgccctggacgcctgcatacggcagattttgattcacttgggcgacgacctggttttgcatatacggattcagcgccgtataaatcttcacgccgtcttttaacaatgtgctgactctgtcggaaagctcactctgtattttttgtttcgcctttccggaagctttttcaagacgtttgtcatagccttcggatgatgaaacaagctgtgtgaattcatcatttacataggaaacatagtcaggatatttatttgttttttcgtttatatcaagcttgatcttttctttttcggcttttttcagctgtttcccggatataacgcctgctttttttaatccgttaagcaatctgacttgtcgttttttcgtataatcaaaatgcttgagaggatcatataatgtagggttattagggatggcgcagataaaggccatctctcccaaagtgagagatttcagcggcttgctgaaataaaattgtgccgccgaaccgacaccgtatacgccgttattaaaataaatcgtatttaagtagccttctaaaatctcatctttgctgtattttttctcaagctgataggaataggccagctccgtcagttttcggctgaaggtgcgttcatggcttaaatacacattccttgccagctgctgggtgatggtgctggcgccctggtcaattttatgatctttgaaattggaggcggccgccctgaccatccccataaagtcaaaccctttatgctcataaaaatgacggtcttcagaggttaaaaacagctgttttacctcattcggtattttattaaagggcacgatcacgcggttctcatgatcgctgacaatctcagaaacaaggcttccgtccctgtcatacatgtaactgttttgaaccaggttgatcgcttttaaatcaatatgtttatcgagcacctgatcaaaaggcttgatttgttttacctctttgccggaagcaataactgtaaatgcacacaacgggataatgccgagcagcaaaatccatccgattattttacgtaccatggtcactctcttttctcctgatttctagccatatcgtatcattcttttaagaatacgagaaggttaaatttagaagaaatcgtgatcgctgccggtcagcccgcatttgacgctgtatccttttgcagatgtcccgccatccataaaagccccgcgcctattaaaaagagaaaggcggtgacgtagaaagcagccgaaatggaaaaaccgctcgagaccgcacctccgagcagagggccgagcacatttccgagaaaacgaaagctgacgttatagccgagcacctctccctggatgctgcccggcgccctgacgcggatcgcggccgtaatgcaggggagcgtgccgcccatgaccatgccgaacagaaatctgaagactaacagaatggagagggaggaggcgagcgcctgcggaatgaaaaacaccgctgaggcaatcaaaagcacgattaagatccggctgtggccgaagcggtcgccgaagtccccccatttccgggcaagcaataagcttccgagtccggtcgctgaaaacgccattccggagaaaaaagctaaattaacaggtccgtgcagctcattgacatataaagcgagcagcggctgaatactgaaattgccggtctgcacgatcatggtaagcaccatcatcgcccaaagcgcgggctggtgaaaaatataggagagcacctgttttctggaataggttttccgcttgttttgtttctcgccgagcggctgctcattcacctgaaataaaacgagaagcacggatacgaaaataacaaaagacgtaataaaaaacgtgtacgtaaacccgaagctgtcagcgagcagcccgcccagcatcggcccgaataaagtgcctgacacctgacccatctgcagcgtgccgagcgttttcccggcagtctctttcggcgtctgcgccgaaatcatggcaagcgatgtcggaacaaagcctgttactagacccataagcagccgcaggacaaacagctgataaacggatgtcacaaaccccatcaataaaatgctgacggcaatgccggtgcctgtaatcaagagaatttttttgtagccgcgcttatcgccgaatctgccccaaaacggggaaatcacaaacgccattaaaaacgtgacgccgaacacatacccgctccatctctgcacatacccgcccgaatgggggctgatcgtttcgatatataacgaaagaaacggaacaatcatggtcatgctggcggaaataaagaaatttgtaatccaaatgacaacgaagttcttcttacggacagaaataacatcaccttctttacttttcgtgtgtctaatcataagtatataggaataaatccggtatttgtattttcgatgcggatataggaaaattcattatttttagaaaatgaagaaagtttcagaggggaaactgatatactatcataaaatatcatttttgatcggaggaaaggcaggtgtaaaaaaagtggatcagcgcagtctgctcattattgattttgaatttacaatgcctgacggaaaatacagcccgcaaaatttctttcccgaaattattgaagcgggaattgtcaagacggtgaatgatgaagtgactgaaacgttttcgagttatatcaaaccgaaaaaatttccgaagctgacgaaacgatgcaaaacctttctgaacatcacccaaaaagacgtggacggcggaatcacgtttaatgaattcatccgcaaattaaatgagcttgatcctgataaaaactgcacgatcgtcacctggggcaatatggatatgaaagtgttaaagcaaaattgcatgtttaaccacatcccttttccgttcaaaggagaacttcgggatctgtcccttgaatacaaaaacttcttcggcgacagaacattgaccggcctttggaaagcggcagaagagtatggcgataaagggacgggcacgcatcataaagcgctggatgatgcgcggacgacatacaaattattcaagcttgtcgagcgggataaacaatatcttgaaaaaccgaaacctccgacgatcggtgatcgcgtcgatctgactgaactgtttcgccgggccacataaaaaaacccaatcatgccgactgggtcaagttcttttaaaatagtcacgctctaacgcggccaagttggtaagcgaacgttccgcccattctgagccgtccgctgtaagctgatctttcagccgggcagacgccgcttgtaaggaagccgtataatcaggcacctcgccatcaaacggtttgaccatctgatgcggtatgtttgtctgttccccgaatgcaagcgctcttctttcatgaaaaaacggaacatccgcctgcttcggatgatgaagatctccttgagcgggatgcgtcagaacggctttaattttcactaaatagtgattgggcctgacgtctgtcacttcccctatgtatgctcctgttttataaaacccttttacgattgtgccgatttcaaacgtattcatagcgttcacctctctctagttattctataaaagatcaacgcggttggctagtgaacagctgccggaagcctgactgaggccgttgtgcccgagtgctcgccgctggtgaaatagacggagccttcatgatgctgaataatcgagaatgtcacggtaagcccgagcccggtgccgttcgttttcagcgtataatacggtttgccgagtttctgcagttcttcatcggacatgccgattccgttatccgtaatctgaatgagaatcatctcttcctgtttttggacggagacctcgattcggccgttttcagagggcacggcttcaatactgtttttaatcagattaatgaaggcctgtttcagtttttttacatcgccgaacacatataaatcaggctcgctttgaacagtcacggtcaccgatttaaaatgggcataagactccattaaggaacctgtttcctttacgagcagagaaatatcaaacttttctttttcatagtcatcctgcttcgccatatcgagataattcgtaatgatcgtctgagcccggtcgagttcggacagcacaagtttctgatatccggagtgggatttgtcctgaagctgctcgccgctgaacagcagctgcacaaaacctctgacgaccgtaagcggattgcggacttcatgggcgacgcttgccgcaagctcgctgacgacggccattttttctgagtgaatcagccttgcccgcatggatgcattctcatcgatgatctcaatcaaataaatgcacagcaaaagggagctgacttgaaaaaaaacagatactgccgcctcatagtaaacggaagatggattttgaaaattgaaaatattggtcgcggaatagatgaagacagatgcggttaataaggcggtttcagtgcagccgatgagaagagcgaaaagcagtttcttccgctttgaaaaaaaaggccatttcgtttggagctggatagggatgatgattaaaaaaggaattaaggataagaaaaaaagagcggaaggttcaaaccatatgagctgaaaaaaaacggatgccgcccctgcggcaagtcctgcggcggtaccggaataaagcaggcagacgataatgggaatcagctgcaaaccgtaacggacggaatgaagctcctggatgggaaaagccgtacataataaggaagatgacgctgcaaatacggcgaccagcaggcggttcgctctcggcacaagcaaatcaggcttgctgagccagaagacttgataaagaaaaatagggaatagaataaaagagaagtgaagcaggtaatcctttacaatctccatttatgcgaaatcctttcctatgtaaatatgaatctattataacatctttaccggaaaaaaaagtatatatttctctaaagcgaacgcccttatctcatctgataaaggcgttctttccgctgctaagcgagcgctgctttcattctctcaagcccttcttttacggcggcggctgaacagccgacattaagtctcataaatccttcgccgcccggtccgtattttgttcccggctctaatatgattttcccttttttgagcattctttctttgagctcggcatccgaaaatccgtattcgctgaaatccatccagatcaaataggaagcgtcaggcttcatcatgcggactttcggcaattcttttcttaaaaagtcctcagccaatttcatattcccttcaatgtaaggaatcagcgcgtcaagccaagggcctccctttgtataggccgcttcgattgctgcaaccgcaaatgtgttgaggctggaaatcccgttctgatgcaatgcggcggagaatttcgcccgcttataccgatcgggaatgataatggcggatgcctgaatgccggcaatattaaacgtcttgctcggcgcgacacaagtaacggaaatccgcgcaaactcctcagacagagaagcgaaaggcgtatgcggctttccgtacagcatcaagtcggaatgtatctcgtcagaaacgacggtgacgttatgggcggcgcacagcgatccgagcttcataagctcatcccggctccacgctctgccggacggattgtggggattacaaagaatcatcagcttgacctcagaatcgctcagttttttctcaagatcctcaaaatccatgcagtagacgccgttttcttcccgtaatgggttatgtaaaacctgccgtttgttttccttgatcatctgataaaaaggcgtatacaccggtgattgaatcaacaccggatcgcccggttcggtaaaggcttgtacggccatgctgattgccgtgacaacaccgggactgaacgcgatgcttgcgggatcgggtcggtagccgtgccgcgtctcaagccatgaagcgacggcttctcttgtgttttcgtcaggagacgtataaccgaatatgccgtggtcaaggcgggcttttaaggcgtcagtgaccgcttcgggagcgcggaaatccatatcggcaacccacatcggaagcgcatccgatacgccgaataacgcttccgccttgtcccatttcaccgattgtgtgccaagacggttttctcgaagatcaaagttcatgtatgtcactcctgtagtatcattattttgcacagcgtatctatgataaaatagaattgcaaactttattataagcggtgatgaaaatggaagaaagccaagcggtcatggaaatgatgaaaatcattgccaagtgggacccgtttaaatatggagaagatttttatgagacagaagccgtcgatatcgttcaggccgtctacagtgaagaccgtgccgacaagctggcagcagccattcaggatatctttgaagcttcatttgagcaaaagcttccgatcgaaggctgccaaaaggccgccgagcagcttctgttcataaaagaaagcagctcctgcaccccttaaaaaccggcggttccgccggtttttttattgaataaattcaaaaatccgctccgaaacaaactctgggcgctcttcgggtacgaggtgccccgtatccttgagtgaatacagaatggaatccggcaggtcgtcatgaagccgttttccgactgagaccggaacgacccgatcttcttctccccagattaaaagagcggggttttgcactttcttcaaatcctcgggctttaaatcgccctccctgtgtctgataaaccttgtcatcgctttgaaaatctggcggtctgtaaatggtttttcgtaaccgtcaatcatttcctgatcgataagcgtccggtcgtgaacgacatttaacaggttgttcagcacgccgtcttttgaaagccaatacttaaggtacaggtcaaaacaagggagatgcgtcccgaatataatcgacgggtgcgagcgctttaaataccccgagctgcacaacaggacgattttagaaaaaagctcgggtctgagaagagacgcggataaggaaatctggccgcccattgaatggccgatgagtgcggcccggctgataccgagcttttccagaagtccgatcagaagcttggcgaggtttgcgtaagtatatacgaaagtccgtgacttttccgattgcccgaaaggaggcaggtcaacggcgataatatcataatggtttctgagcagcgggatcagttttctgaagctgaatgccgaagataaaaaaccgtgtacgcagacgagtgtctgtctgccgggattttcataatgctcgtaatacagctcaactccgtctatcgcggcccgtttaatcggtgaaacagcttccatgagagccttcgccgtcctttctttgttgtaatgtaaaggcttttttgattgtcagattttagctctggtttctttcgggtttttcttagcatttgtcgaaaatcgtgatataatgtcatgaagatttttgataatgcaaaggtgtgaaacgtatgaagctgaccgaaaaagaaacagaaatattagaaattttagacgaaaacagccgcgttgatgcggaaacgatcgcgaaaatggcaaacattcccgctgaagaagttaaaagcatcattgaaaagcttgaaaaggaaaaagtcatcattgattatgcggcgatgatcgactggcgcaaagtcgacggtttggaaggcgtcacggcgatgattgacgtaaaagtcactccgaaacgaaatgtcggctttgatgaagtcgctgagcggatatacagattccaggaagttgaatcagtgtacctgatgtcaggggtgtatgacttatccgtcgttattcgcggcaacacgatgtcagacgtggcaagcttcgtgtctgaaaaattgtccacccttgagtctgtcgtttccacgacaacgcacttcatcctgaaaaaatataagcatgacggcaaagtctttgaaagcggagacgatgacaaaagaatcgtggtgtctccgtaaatggaaacgaagacttcttatttatctgactacgtgcagcagattaaaccgtcaggcatccgcaagttctttgatctggccgctacgatggaaggcgtcatttcactgggagtgggagagcctgactttgtgacggcctggaatgtgagggaagcgagtattctttctttagaacaggggtatacggcttatacggcaaatgcgggtctttatgaactgagagaagaaatcagccgctacttagatcagcggttcggcctgagttattcgcctgacagtgaactgatcgttactgtaggggcaagccaggcgcttgatctcgctgtccgcgccattatgaatcctggagaggaaatgttaattcccgaaccgtgttttgtcgcatatgaatcactcgtgaccctgacgggggcgaagccggtgccgattcagactgtcgctgcaaaaggtttcaaagcatcagccgccgattttgaagcggccctgacggacaaaacaaaagcgctgcttctatgctcgccgtcaaatccgacaggttctgtctattcgaaagaagagcttgaatccatcgctgctttcgctgaaaaacacgacttgatcgtgcttgccgatgaaatttatgctgagctgacgtatgatgagccattcacgagcatgggggccatccgcggcatgaaggaacgcacggttctcatttccggcttctccaaagcatttgccatgacgggatggagactcggatttacggcggcgcctcccgtaatcagggatgcgatgctcaaaattcatcagcacgcgatgatgtgcgcgccttccatggcgcaatacgcggcgcttgaagggctgaaaaacggccaggaagacgtcgaaagaatgaagaaaagctatcggagacgccgaaacctgattgtggagacattgaacgaaatcggactcggctgccaccaccccggcggagcattttacgcgtttccttccattcagtcgaccggcatgagttcagaagaattcgcggaacagctgctcattgaagaaaaagtagccgtcgttccggggaatgtattcggcccgagcggcgaaggctacatcagatgttcctatgcgacatccattgagcagattcaggaagcgctcgtcagaatcaaacggtttgttgaaaaaagggcataaaaaaagatacgaacccggttcgcatccaaataaaaggggggaatactagaaagccttcgtaatcatagtatacccccatttttctgtgcttaaacatgatcatgtaaaaaagttctctttgcgaaaaacaaacttgtatgatataattttaaattgcgtataatctgtatttaatttaacttaggagttgttatgaatggcagcaaaatttgaagtgggcagtgtttacactggtaaagtaacaggattacaagcgtatggtgcgtttgttgcattagatgaagaaactcaaggacttgttcacatttctgaagtcactcacggtttcgtaaaagacattaacgagcacctttcaatcggtgacgaagtacaagtaaaagtacttgcggttgacgaagaaaaaggcaaaatcagcctttctatccgtgcgactcaagcggcgcctgaaagaaaagaaagcaaaccaagaaaaccgaaagcggctcaagcttctgaagaaacatctgctccgcaaggtttcaacacattgaaagataagcttgaagagtggattgaacagtccaaccgcaaagaccttatcaaaaaataatcattaaaaaaagcaccggatatgtatgttcggtgctttttttatgtttgtttatctgacttccggatttgccgcttcctcgcgggatgtttcttcgttcggcttaaacagcaggccgagattgatcagaccggcgatgccgacaagaccgtaaataatccgcgacagagctgatccttggccgccgaagatggctgctactaaatcaaattggaaaaatccgatcagtccccagttaatagcgccgataatcgttaatacgagacagatacgctgaataacactcatgtaaacaacctcctctatgaattcgtgaaacagttatagattgtgacaaagcaaagaatctatgcatactacattctccgctgtgtaaatcacacactgtctcaagctgcacaagtgcctttcccgcgaagccgctgcctgtaaaccgtgtgatgtgccgtcaaaaaagcggattgctttacattgaatgtcatctttctgcataatataaatccaaaggaggagatgtcatgcaaaactttacatattggaatccgaccaaattgattttcggaaagggagaggtcgaaaaacttcctgaagaaatcaagccgtacggaaagaacgtactgctcgtatacgggggcggcagcattaagcgcagcggtctttatgatcaagtaaccgaactgctgaaaaaagcaggagttaccgtacatgaattggcaggcgtagagccgaatccgcgtgtctcaacggtgaacaagggtgttgcgctctgtaaagaaaacagcatcgatttcttattggccgtcggcggcggaagtgtcattgactgcacgaaagccatcgcggcgggcgctaaatatgacggcgacgcgtgggatatcgtcacgaaaaaacaccagccgaaagaagcgctgccgttcggaacagtgctgacccttgcggcaaccggttcagagatgaactccggatcagtcatcacaaactgggagacacaagagaaatacggatggggaagcccgctcgtttaccctaaattctctattctcgatccggtaaacacatttaccgttccgaaagaccacaccatttacggcatggtcgatatgatgagccatgtgtttgaacaatatttccaccacacgtcaaacacgccgtatcaggaccggatgtgtgaatcgcttctgcgcacggtgattgaaacagcgccgaagctgatcgatgatctggagaactacgagcttcgtgagacgattttatatacaggcacgatcgcattaaacggaatgctgtcaatgggcgcaagaggggattgggccacacacaacatcgagcatgcggtatcagcggtttacgatataccgcacgccggaggtttagcgattctgttccctaactggatgagacatgtgctcaaagaaaatccggcccgctttaaacagcttgccgtccgtgtctttgatattgacgagacaggcaaatcagatgaagagatcgcacttgaaggaatcagcaagctgtctgatttctggacgagcctcggcgctccgaacagactcgctgattatgatatttctgatgagaagctggatacgattgcagataaagcgatggcaaacggagtattcggacagttcaagtcactgcagaaagaagacgtgcttgcgatactgaaagcatcattgtaataacataaagggggcggccggattggcagctcctttttttctgtgttatagtaattcccttacgatttttttggaggtcatgataaatggagaactttacgtactacaatccgacgaaactgattttcggaaaaggtcaaatcgaccaattgaaaaaagagctgaagcaatacgggaaaaacgtgctgcttgtttacggaggcggcagcattaagcgaaacggcctgtatgaccaagtaacaggcatcttaaaagaagaaggcgcaaccgttcatgagcttgcgggtgttgaaccgaacccgcgtctggaaacggtaaataaaggaattgagctgtgcagacagcatgagattgatttccttctcgcagtcggcggcggaagtgtcattgactgtacaaaagcgattgcggccggtgcgaaatatgacggtgacgcatgggacatttacagcaaaaaagtaacggcgcaggacgcgctcccgttcggcacggtgctgacgcttgcggcgacaggctctgaaatgaaccctgattccgttatcacaaattgggaaacaaacgaaaaattcgtatggggcagcaatgtcactcatccgcgtttctccattttagatcctgagaatactttcagcgttccggaaaaccaaaccgtatacggcatggtggatatgatgagccacgtatttgaacaatacttccacaatgttgaaaacacgccgcttcaggacagaatgtgttttgcggtccttcagacggtaattgaaacagcgccgaaacttttggaagaccttgagaactataagcaccgtgaaacgattttatacgcgggtacgatcgcattaaacggcacgctgcaaatgggctatttcggcgattgggcttcccatacgatggagcacgccgtatcagcggtttatgacatccctcacgcgggaggacttgcgattctgttcccgaactggatgagatacacgcttgatacaaatgtagaccgttttaaaaacctcatgctcaacatgtttgacattgatactgaaggcaaaacggataaagaaattgcgcttgaagggatcgataaattgtccgcgttctggacaagcctcggcgcaccgtcccgccttgcggattatgacattggtgaagacaagcttgagctgatcgcagacatcgccgcaaaagaaatggaatacggcggattcggcaatttccaaaaactgaacaaagatgacgtacttgccatcttaaaggcgtcactgtaagatacattcccgcccggggtgaagatgaaatagattttcaagctgcagatgtaaccgttttggggagtccctctttccatattttcattaatgcatcaagagcaagtgaaacaccccttgccatgagacaactatggaaatctcacatgatgcggttttgactccctgtttctgtacatttagcagaaaaggatcaattaactttgcgattgccgatcatctttttacacaaaatctaaatcatgaagatgaagagccttgctatacttcgaatttaaaaaaggggcgctgattcaatcagcgctccttttatgcattttgtgtactaaggtcccgctgcgcccccatatagcttcccattaagttttgataaccgggaagatgactggagattaatgcgccaaaaccttcaacatcgttgcgccaatcacgctgaagctcgcacgctacgctgaaccagttcataagctgcgcgccgccatgagccatacgcgttaatgatgcatctgctacttgcttattaaacgtccccgaagcatctgtcacaacaaacacttcgtagcctgctttaatggcagaaagcgcaggaaaagcaacgcagacgtctgttacgacccccgcaataatcagctgttttttgccagtcgcttcaatggctttaacaaagtcttcattgtcccatgcattaatttgtccaggacgggctatttttggcgcatcaggaaagagatcaacgagttcttgcatgagcggtccgttgggtccattttcaaagctggttgttaaaataaccggtaaatcaaagaatttagccgtatcaccgagagccaatacattgtttttaaattcatcaacgccatagtcacgcacgagaccggaaataaggccggtttgatggtcaactaaaagcacggcagcatcatcttttgaaagacgggaatatagatcagacattttataatcctccttgaattaaggcaagtaagtttgtgaattgaaaacggtaaatctattcatatgctgtgtagatagaaagttatttctgaggtgacttttcgtgagggtgatgatccttcaattaatctggaacgggaaccggagcatgatcaatccaatggatgaactgttgtaaatagcgttgaagataacgttttgtttgttcatccgtaagtatgttttgagcggaatcaattttctcatggacttgcgaaatcagcattttttgaaatggcaaaacattgacttgcatagcttcgagtacttctctcaattgcgtttgaccaaaggcagtgccgaaccctccgggggttgctccgattaagccaactggttttctgtttaaaacagaagaggtccgcggtctcgatgcccagtccaatgcattttttaatacccccggaattccggaattgtactctggacttacaatgatgacgccgtcaacgtcttgtatatcagttctaaaggatgttacggagtctggtgctccggcaatttctaaatcttcgttaaaaaaaggaagactgtctatttcaacccagcgaaattgagccgcattatctaagtcaatcaatgattgagcaatcgctcgattatacgagttttttcgtaaacttccacaaataagaccaatggttttagtcataaaatcacctcccggtataaaatcactttcatcttaacacgataccccaaatatagacactatttttaaaaatggacatttatgccttaatattcctgtgcggcagcctctcaagaggagtactatataaaaagaaccgtcccctcgggattggcgatggatgtcatcctgctccaaagtaaaggtgatacattcctggatcaccaacattcgattcgttatccctctcacagttaatacaaatataaccatctcgaatccggaatattgtataaaaaatgaacgcatctttagcgcaaatcccgtattcatccgcccttcttcatgacttgatttagcgggtgagttcatataaagtgaaagagaaaacaattcaccgtgatggagggacaagcaaatgacgcatgtacgctttgattactcaagagcgttaccttttttcaatgaacatgaacttacatacgcacgtgatttcgtaaaaacggcacaccataatatccatgaaaaaacaggcgccggaagcgactttttaggatgggtggacctccctgaaaactacgataaagaagaattcgcgcgcattaaaaaaagcgctgaaaaaattaaatcagattcagacgtgcttctcgtcgtgggtatcggcggttcatacttaggcgcccgcgcggcgatcgaagcgctcaatcattctttctataatgttctgccgaaagacaagcgcaaaaaccctcaagttatctttatcggcaacaatatcagctcaacttatatgaaagatgttatggatcttttggaagacgctgatttctctatcaatgtcatttctaaatcaggcacgacgacggaacctgcaatcgctttccggattttccgcaaacttcttgaagaaaaatacggaaaagaagaagcgaaagcgcggatttacgcgacgacagataaagagcgcggcgctttaaaaacgctttctaatgaagaaggcttcgaatcattcgttattcctgatgatgtcggcggacgtttctccgttctgactgcggtaggtcttctgccgattgcggtaagcggggctgatatcgatgaaatgatgaaaggcgctcttgatgcaagcaaagacttttccagctcggaattagaggagaacgcggcttatcaatacgccgtcgtccgcaacgttctgtataataaaggaagaactattgaaatgctcatcaactatgagcctgcgctgcaatactttgcggaatggtggaagcagctcttcggcgaaagtgaaggaaaagatgaaaaaggcatctatccttcttccgctaacttctcaacagaccttcactctctcggtcaatacgtgcaggaaggcagacgcgatctgtttgaaactgtattaaacgttgaaaaaccgaagcatgagctgacaattgaagaagcggaaaatgatctcgacggcttaaattacttagccggcaaaacggtcgatttcgtcaataaaaaagcgttcgaaggcacgatgcttgcccatacagacggaaaagtgccgaacttaattgtcaatattccgcagcttaatgcatatacatttggatatctcgtctatttctttgaaaaagcggtggcgatgagcggttatctgctcggagtcaacccgtttgatcagccgggtgttgaagcctataaggtgaatatgttcgcgcttctcggcaaaccgggctttgaagagaaaaaagcagagcttgaaaaacgtcttgaaaaataaaaaaaagtgctggccctcagcatgacgggtcagccttttttaaaccgtgaaaggtgtgatgatgaattgatgcggctcttatgtaagcatgccgtcatttccgtctgttccgccgctattgtctattcggcactaaaactgtctcctgaatccctcttacaaaccatcctgtttttcgctttccctctcggcttgtttacggacatggtccggctgaaactgaagattggccggatgcatacgctgatgacgaagtgctgtctctattccgccgttttctatatttcaacggaagccgttctctccgcaattgtgacgtatgttctgattgaatgcgccgttacctctttccggcgtctgtctgccgctcccgattcttcccagacgccgtatgaagatgccgcagagcggggacgctaaagacaaaaaggagtatatgcacatgatcagcattccatcttcacttgaagggcaatcgtttttactccgcgaattggaacaggtgctgaaaccgatcggttataccatcggaggcggctgggagtatgaccgcgggttctttgattacaaaatttccgatcaggacggctatttatttctccgcatccctattgaagcaaataagggacacctggatgaacggggggccgccgttacaatcggcacaccctttttgctgaggcacgtctatcagcaggaaacggatgatcacgcaggcggcggtgtttttgagtcattattcaaccaattctccgagccgaaacggcgggatgcggcaattgaccgctcatatacagatatcggcatctcgcttgtgaaagagctggaagacgtcctgctgcattaaagagccaaaaacagatcagtatcgagcacctggtatgacaggggaggggtcagcatcggcccctcttctttttgtatgccgatgatcgtggtattccgtttgagataatagagcgcacagtcatgataagatgaaccctttaattcctcggggacgggaatgatgcgcacctttttctccagcgtcagatctgacagcgtttgcggtttggcaagctgcagcttgacccggtaatgctcaaacatcacccggctcgacagccgtgatgtgcacagaatcttattggctcctgcgcgctcggcgtttttgacataccgttccgttaaaatttccacgatacaataaacggacgggtgcagccctttgatggcgagaagcgttaataccgacagcatatcagcttcggattcatttttctgctgatccgctgtcagaatgacggtatcggcttccgtaatattcgctttattgagcgtgctgtcatcagcggcatgtccgcggatgaaatggacgttttcaataagcggcccttcccttaatgaatcatcaatcaggacgacagtttttgacggtgcgatgtgctgcagttctttcagcagcatatgcgacttctcattccatccgataagaatgacgtgccccttgcctttaaaggcgaccttcccttcgacatagcggtgctgtttgctgaacacggctgaagaaagcgtggcgaaataggcggtcacaaaactcgctccgcttaatacaagcaccataccggcaatctgcccgagcggtgtctggggaacgtaatcgccgtagccgactgtggccaccgtaatcaccgcccaccaaaccccttcaaacacagacgtgaattgcttcggttcgagcatgtaaatgagttggccgaacaataaaatcaaggcgataatgatcagcccgatccgaacatataacggccatctcagccaggaaataaataaacggtttgatttcattcgtccggctcttctttcgacagagagatggataaaatctgtttaataatggtgtttagtttttcgtccagctgttcctggccgtatgagtcacgcgcatgtctgattaaatcggccgtctcatcttcaaactgaatgagaggttcatcgttttccgcttcattatagagctggatgaaggcgtcaagcccttcgttcattctgtctatcgcattgctcagctgttctttctcgccatttgtcactttcatgtcgatcacacctgtatctttttttatacagtatgtcccagttcgtttgatgtctttcaaaaatcgccgaaaacatattcaccctcattttttcatatgataaagaaagcggaccgaaaaagggtgagtcaaatgacagtcattcaaaaactgctggcggcgctggccggagcgcagctgctcgcttcggcggccgtattgcttatttttgatttgaatggatacaatcacatgtcaggcggattttcatggcttgtttttgtaaaagagaccgcaggcacgtttccgttttacatcggattggccgggtgtatcctcatcatgctcggaggattgattcctgtcagaaaaaagaagcggatttctgtacaggaaagcggacaatcattaaaataatatataagcagatcgtacgatataagagaaaaaggaagaggataatatgctgtttatctttttaacaattgctgcattgggattgtcgttttgggcacaatttaaagtgaaaagcaattttcagaaatactcagacgtggaagcttccagtcagcggacgggggcggaaacggcaagacggattcttgatattaacggtttatatgatgtgccggtagaaccggtaagaggcactttaacagaccattacgacccgacggagcgggtggtgcgtttatctgagccggtatattacggccgctccatttccgccatttccgtcgcttcccatgaagtcggacatgctttgcagcatcaggaatcatacggcgcgcttgtgctgaggcacaaaatttttccggtcgtcaattttgcctccggggttgcccctctgcttttcttgggcgggatgctcctgggcagcttgaacttaatcggactcggcattattttgttttcggccgctgtttttttccagcttgtcacactgcctgtcgagtttaatgccagcgcgagggcgaagcggattatcgtgtcggaaggattcattcgcaacagtgaagaacacggcgtgaataaagtgctgaacgccgccgcgctgacgtatgtggctgcggcgctcgtttcattattcgagctgcttcgttttgtgatgattttcttaaatggtcgtgatgagaattaacacgaaggaggtggccccttaccgtttgcggtaggggtttttttgcttatattaaaactgattctcattatgctgttaatcggattaacggccatctttgtcgctgcggaatttgcgattgtcaaaatccgcggttcaaaaatcgcggagctggttgaaaccggagacagccgggcgctcgcggcgcacagggtgatttcaaatctcgatgaatatttatcagcgtgccagctcggcattacgattacggcgcttggactcggctggctcggtgaaccgacgattcagcggcttcttcatcctgttttcagcctgatcggaatgccgtcatctattacgcacgtcgtcacgtttattgcggcgtttatcgccgtcacgtatctgcacgtcgtcatcggagagcttgcgccgaaaacgatatccattcaaaaagccgaagccgtcagtctgtggacggcgaaaccgctcattctgttttataaagtgatgtatccgtttattaagctgttaaacggctcagccggatttttggtcaagctgttcggttttcattcggtgaaagaacatgaggtcgtggtcagtgaagaggaattgcggctgattttgtccgaaagctataaaaaaggtcaaatcaatcaatccgaattccgttacgtcaataaaatatttgaattcgataaccgggtcgccagagaaatcatggtgccgcgcaccgaaatcgccgccatctcgcttgaacagtcagttgatgaagccatacatttgatcatcaacgaacggtatacgcgatatccggttattaaggaagacaaagatcacattctcggcattattaacaataaggatttatttaaagcgtattttctcggccgctccattgaattaaaagaaattatgcgtccggtcatcagagtcattgaaagcatccccgttcaggagcttttgatccgcatgcagaaggagcggattcatatggcgattctcgttgacgaatacggcggcacggcgggacttgtgaccgtcgaagacatattggaggaaatcgtcggggaaatccgtgatgaatatgaccaggatgaaatgccccacatcgtcaaaaaaggcgaacaccactatgtgatggacggcaaggcgctcatagaagaggtgaatgatctccttgatatcgccatcgaaaatgaagacattgacacgattgccggctggctcttaacacaaaaaatggagctgaaaaatggtgatgtgtttcatgccgaagggtgtgaatttaaggtgctggaagcggaagaccatcatatccgcttcgttgaaattaaaaaaactgatttctgagcctcctgcttttgcaatgaggctttttttatgaaaaaaatgcttcttcgtcccgctctttcatatgctgtaaagaaaggagtgtcggtatgaaaacggattggtggaaaacggcggccgtctatcaaatttatccccgaagttttatggattcgaacggggacggaatcggcgacatgaacggcatcagagcaaagcttcattacataaaagagttgggggcggatgtgatctggctttgtcccgtttttgactcgccgggcgcggacaacggctacgatattcggaattataaacaaattgccggcgaattcgggacgatggaggattttgaccggctccttgcggatgtccatgcgctcggcatgaagctgattatagacctcgtcatcaaccatacaagcgatgagcacccttggtttatcgaatcacgctcagcgaaagattccgaaaaacgggactggtacatctggagagacggaaaaaacggcaaagagccgaacaattgggaaagcattttcggcggatcagcgtgggaatatgatcaagaaaccgaccagtattacctgcacctctttgacaaaaaacagcctgatttaaattgggaaaacgaagcgatgaggcagtccgtttatgagatggtccgctggtggcttgataaaggcatagacggcttccgggtggatgccatttctcacattaagaaaaaagaagggctccctgacatgccgaatccggacggtctcccatacgtcccgtctttcccgtatcatatgaatggggaaggcataatggatctcttaaaagagctgaaacgggaaacattttcgcgctatccgatcatgacggtcggcgaggcgaacggagtggcggcttgggaggcggctgattgggccggtgaagaaaacggcgtctttcaaatgatttttcaatttgaacatctcggcctctgggatacggaaggtgatcaaagcatctccattccggcgcttaagcgcgtcttgtccggctggcagaacagtcttgaaggaaagggctggaacgcgttatttatggagaaccacgatcagccccgttccgtctcggtatggggtgacgaacggtttttgacagaaagcgccaaggcactcgccgcgatgtatatgctgatgaaaggcacgccgtttatttaccaggggcaggagctcggaatgaccaatgtttcgttcccatccattgaagattatgatgatgccgcaatgaaatatctgtatgaaaaagagacgtcccgcggcgttccgcatgaaaaagtgatgaagatcatctggaagaagggccgggataattcacggacaccgatgcaatggagcggtgaggcgaacggcgggttttctgatgcttctccgtggctcggagtgaatccgaactacacatggctgaatgctgcatcacaaatgcaggatgaaacatccgtataccatttctacaaacggctgctcgccctcagaaaagaacacggcgtattgatcagcggcacatacgaattgctgcttccgaatgaccggcagatttatgcctatctaagaaaaaacggaacaacaaccgccctgatcatcacaaatctgtcccgaacccccgctttatacaggcatcccggttatccgcttgactccgattctctcgtgcttgcaaacgcggagacagaagtgcaccgccatgtgacatcctttgttttaaagccttatgaggcccgcgtatatatatggtgaaaaacttcagtcccgaggctgaagttttttgtgatctgcgtttatcatcgcgatccgacaggaaaagacaaatacagaaacgaatatgggaaaggaagagaaaaagaaaggaggcatttatatgctgaaaaaattgcagattcaaacaaacagacgggatgaaatgatcgacatcacacatgaagctgaagcgtttctccgcaaaacaggcgtaaaaaacggtttggcgctcatatactgtccccatacaaccgccggcattaccataaatgaaaatgccgatccggatgtgaagagggatatgctcagaaggtttgatgaaatatatccgtgggaccacgaactggaccggcatatggagggaaatacggcggcacatatgaaagcgagtacaaccggcgcctcccagcatgtcatcatagaagacgggcgcctgatactcggaacatggcagggcgtttatttttgcgaatttgacggtccgcgaaacagaacatgttatatcaaaatacaggctgaaacggaggaaaacaaatgagtgagtggatgagtgcattatcattaacaaagcccgtcattcaggcgccgatggccggcgggctggtcacgccgcgtctggcttcggcggtatcaaatgaaggggcgctcggaagcctcgcttcaggatacgtcagcccgcaagcgcttgaaaaacagcttatcgagatgaaagagctgacggaccgctcctttcaagtaaatcttttcgtcccggaagaaaggcagatgcctgaggcggaactggttaaaaaatggaaagcccgcatcccaagggcaaaagacgccaagccgttctctgatctgaaagaagaatggaatgatttcgaggaaaaagcggagcttctgatccgttacggagtcaaagcgtgttcattcaccttcggcctgccgccggaaaaaacggcggaaaagctgaagaaaagcggctgtttccttttcggcacggcgacaacgccggaggaagcgaaagcctttgaagaacgggggatggacgccgttattctgcagggaatagaagccggcggacatcgcgggtcgtttctgccggttaaaggagaaccggctctcggccttatggcgctgattccgcaggctaaagacgcgctgaatatcccggtgattgcggcaggcggcatttttgaccgccgcggggtgcaggcggcccgatgtttgggtgcggacggcgttcaagtaggaacaccgtttctcctttgtgaagaaagcagcgcctcaccggcatatcaaaaagccattgccgaatcaaaaggagccgacacgcggctgaccaccctgttttcgggaaaactggcgcggggaatcgtgaatcagttcatgaaaacatatgaagccgacgagggaaatacgctgccttatccgctgcataatacgctgacaaagccgatgcgcgggcacgcggctcaatcaggagacgcggagtatatgtctttatgggccggccagtccgccgcgaaacttgaagggccgacagacgtgaaaaccgttttggacagattgtgcgaatcataatccagaaatcgtgaggtgatggatgatgaagattcttcaaatgtcctacgaaaaaagagggactattgagtttgtctttgaagattttccgcattccaaagtcaccatggcgccgattaaagggtattactttgtccgcgccattaaatggagcagacgggacagagccgtcacccgacatgatttagagaagtttgaatgggctgcaaaccaagcgctcggcacgacggctttttaccggaaaagaaaagcattccgcatcccatcgtcacaatgacagacgatgggattgttttaatgcatgatttgataaagcgcgggtgcatcaagccttgttgcctggttaagcagataagccggctgcacggcatttttttttcttaaagaattcaatctctggatgatttgttcagcggtcagaatcccgagaccgtgggcgaaatattgatcattccccatcacaatgacattctctccccgccactgagcctttgcaggattaaaatcaggatttttaaaatataaacaatctccccgtaaaaagtggctgccggtttccgtgtagatcggcagatgctcatagtgccagtcatacaaagtgatatcccggaaacgccggttaaaccgttcttcaccgattgtctttaagacggccagataataaatcacaacaatggcggtagcgcattcaaatgcgtaaaacgccccgttttcaataatgtcccgaatcgcttttgaagcggggattctgtacttcagctccaaggctccttccggcgtcactctccaataagccgtatttccgtatgttttggcgaaagttgcaaatttcacacctgatccgtgcagttctcttgcggcttccacaatatggcggcgcagccgcacctcgaacatcagttcagcaatcgacccgtaatcgaattgtacgggagaattgagcagttcatttatatacggaacaaggctttcttccgtctgccagttcgcgatgtcctgaggccgaagcacttggccggatatgataatcatctgcgcgccccccttctctttttttataagatatgcaggaagcttgggcaacgaaaatcaagtcataaaaaaggaggaaatgttaacaaaatgtgaaggctgagccgatatataaggtatcacacttgagggagcagcttaatatgaaaaaattcatcaattggtgcacgaaggcatcgatttcacgtaaattaatcatttcatttatcgtgatcttaatcataccgattctcgtgttagaattcagttcataccatacggcgagcaattcgctggatgatcagatttcaggcaacgcgaaaaataacattgaatcttttaacacaaccattacaaatgatatcggcgcaaaagcaaaggcgattgaatttttcagtgaaacgttaaaagggtcatccttctcaaagaaaaacatgtctgctcttgaagaaaagttcgggcaatacacgtctattcataaggacgtagcccgcatttacggaggaacggaagacggcagctacgcacaggcgccgaaggagaatactccggccgattacgatccgagaacacgcacttggtataaagacgctgtgaaggctggcggcacgctcgttgtcaccgacccttacaccgcggcaagcgacggcagcatggtcgtcaccgtggcaaagcagatgcaggacggaacaggcgtagtggccatggatattacgattgaccagctgctgaagcagatgcagggaatcaaaatcggacaaaaaggattcgtgtttatcacgtccaaaaataaaacctatgtcgcgcataaagaccacaaaccgggtgataaagtttcaaccccgtggctgaatgaggtatacagcaaagacagcggcattatttcatacaagctcgatgatcaaaataaaaaaatggcgtttacgacaaataaactgaccggatggaaaatagaagggagcatggagctcaacgaaattaaagacgcctcacaaccggtgctgacgatgggaatgatcgtccttgcagcatccattatcatcgggggaattttaattctgttcattgtcagatccattacgtcaccgctgaaacggcttgtccgctcttctaaacaaatcagcggcggagacttgaccgagaccattgatatccgctcgaaagatgaattgggcgaactcggcgcgagctttaatgaaatgggagaatctctgcggggactgatcagcgcgatccaaaactctgtcgacaacgtggccgcgtcatcggaagagctgaccgcttcagcttcgcagacaagcaaagcgacggaacatattacaatggcgattgagcagttttcaaacggaaacgaagagcaaagcgaaaaagtcgattcaagctcagctaagctgaatcatataaatgacggactcgccgccgtttcccgcacatcatcatccattacggaagcatctaaacaatcgaaggaagctgccggcaccggggaagaatatgtgcagcaaaccgtcgggcagatgaatctcatcaatcaatcggtccagcaggcggaagcggttgtaaaaggtcttgaggccaaatcaaaagacatcactcatattttaagagtcatcaacggtattgccgatcagacaaacctgcttgcgttaaatgcagccattgaagcggcaagagcgggagaatacggccggggcttctcagtggtagccgaagaagtgcgcaagctggccgtccaatccgccggttctgccaaagagattgaaaaactcattcaggaaatcacggctgaaattaatacatcgcttcacatgttcacatccgttaatgaagaagttcaatcaggacttgccgtaacggaccgcacgaaagaaagcttccagaatatcttcggcatgacaaacgacatcgccgagaagcttcaatcgatgaacggcacggttgaacagctgtcagacagctctcagcacgtttcagccgcagtgaccgatatcgcggacgtatcacgggaaagcgcagcaagcattcaggatattgccgcatccgcagaagaacagcttgcatcaatggaagaaatcagcacatccgccgatactttggcgcaaatggccgaagaactgcgggaattaacgaaacaatttaaaatcaactagtaaaaaaggacgctttccggatggaaggcgtccttttttatagtgacagccggaaaattaaataaaaagtcttgcatacaacgggagtacatagaactatttttcatttatgacttaattttcaatgtaataaaaagggagtcggccgatataaacagtaaatgattgaaagaggtttacaaaattgaaaaaaacagcaaaaaaaatcgccagaaaatcaatagccaaaaaacttatcatttcatttttactgatcttaattattccggtagcagtattggctgccggcgcctaccgttcggcggcttcatccgttgaaaagcaaatgatggaaagcgccgaaggaaatgtgcaaatcttaaacaatatgattgatgaccggatcggaatgtttacaaaaagctcagcatatttcagcgaatgggcgacaagcgctaaatttaaagaaaaaaaccaaacggaaatgcaagaaaggttcaaacagtttattgaaagcaatgataaagcgtccgccatattttcaagcagcaaggaaggaacgtttacccgttatccgcatgccgatatgccgtccgatttcaatccgcttgaaagaagctggtatcaggaagccatggagaataaaggccaaaccatcatcacggacccttatgagtccatctcaaacaaaaagatggtcgtcaccatggcccgcgcggcgcaagacggatcaggcgtcgtcgccattgatataaaaatcgacgatctcatcacgatgacaaaagaagtgaacatcggaaaagaaggatacgcctttatcctcagcaaaaataaaaaagccgttgcttacagtgatgaaaaagccggtgcggcggtatcgggaaaatgggttgatacattatacagcgggcaaaaaggcgactatgaatatacgctgaacgggaaagcgaaaaaaatggcgtacgtgaccaatgaagcgacgggctggaaaatcagcggaaccatgtccgtggatgaaatcaaggatgcggcaagaccggttctgactctggccgttatcatattggcgatagccatcgccgcagggatgattttcatttattttgtcatccgctcaattaccaaaccgttaaaacgtctcgtagcttcagcggaaaaaatcagcagcggagatctgacggaaaccattgatgtcggctctcaagatgagctcggcgtgctcggtaaaagttttaatcatatgacagattcactccgttcgcttattcagggaattcaggactctgttgaacatgtcgcttcttcctcagaggagctgacggcttcggctgagcagacgagcaaagcaacggaacatatcacccttgcgattgaacagttttctaatggaacggaagaccaaagtgagagtattgataaagcgacagcacaagtgaatgagatgaaagacgggctcagcgatctggcggaagcggcagccgtggtgacggaaacgtcaattgaatcggcggagatatccggcgccggtgagcggcttgtcaagaaaacagccggccagatgggcgccattgaccaatccgtaagtaaagcggagcaagtcgtacaagggcttgaactcaaatcgcaggacatcaccagcattttgcgcgtcattaacggcattgcggatcaaacgaatctgcttgctttaaatgcagccattgaagcggcaagagcgggagaatacggacgcggtttttcagtcgttgccgaagaagtgagaaagcttgccgtccaatccgccgattcagcgaaagaaatcgaatccttaattcatgaaatcgtcaaagaaattcatacttcgctcggaatgctggaatccgtcaatcacgaggtgaaaagcggacttcagttaacggacgaaacggaaaaaagcttccgggacatttccgctaaaacaaatcagattgccggtgaactgcaaaatatgaatgcaaccgtggaacagctttctgccggatctcaggaagtatcaaacgcttcagaggatatcgcggcagtctccagacaaagcgcggccggcattcaggacatcgcggcttcagctgaagagcagcttgcgtccatggaggagatcagttcctcagccgtcacgctggaaaaaatggcggaggaattacgcgaactgacaaagcgttttaagataaactcttaattaagtctaaaagactaattttgcaataggtaaaaagtatgtttcgttatatttcttctttttggatgtgtatatttacccataattgccgatatgaagggtaaacacgcaagaggagatatagcagatgaaaaaaattgtgcaaatcatcaagcagagatcgcttacaagaaaactgctcatttcttttttggccattctcattcttcctatttcaacgctggcttttatcgcctatcaatcggcggtaagcacgcttgacaggcagatgatgggaagcgcactagataatgtgcagcagattaacgatatgatcaacacaagcatcagccaaaaggaagacggaacggcatatttcagcgactggctcacaaaggatcggtacaagccgaaaaaccaatcgcaaattaccgataaattcacagagtacatgaagatcaataaagacgtggaatccatctatacgagtgacacggaaggacatttcacacggtatccggatctgcagatgcctaaaggatataatccgcttgaaagagactggtataaaaaggccgtggaaaataaggggaaagttgttgtaacagatccttaccgcacggcttccaccaatacgatggtcgtgacggtcgttcagcagacgaaagacggctcaggggtcgtcgccatcaatatgaaaatcgatgaacttctgaaaacgacaaagaaagtgaacatcggaaaatcaggctacgcttttatcctgacgaaagacaaaaaagtggtcgcccacccgaaccgcacgtcaggcacagtattaaacggggattgggctgaacagctgtacaacagcaaaaaaggtgattttcaatacaaatacgacggccaggaaaagaaaatggcttatgatacgaacgggctgacaggctggaagattaccggaacgatgtatctggacgaaattcatgaagcggctttgccgatccttcatctgtccctgctcgttctcgtattagcgattgtcatcggaaccatcgtcatggtgctgattattcgttcaatcacaaaaccgctcaagcagcttgtgacatcatcgaaacagatcagtgaaggcgacttaacagaaacgatcgaaattcagtcaaaagatgaattaggcgagctgggcaaaagctttaacaatatggccgcttcactcaggtctctcatccatgccattcaggattccgtgaataacgtcgcatcttcctcagaagagctgacggcttcagcggagcagacaagcaaggcaacggaacatatcacactggcgatcgaacaattttctaacggaaatgaaagccaaagtgaaaatatcgaaagcgcggcggaacatatttatcaaatgaacagcgggcttaaagatatggcgaaagcatctgccgtcattaccgaatcctccgtcacatcagcggaagtcgccaattcaggcggaaagctcgtccaccagacggtcggccaaatgaacgtcattgaccggtcagtgaaagaagctgaacaagtggtgcgcggacttgaaacaaaatcaaaagacattacaaacattctcggtgtcattaacggaatcgctgatcagacaaaccttcttgcactgaatgcggcaattgaagccgcgcgtgcgggtgaatacggccggggcttctcagtcgtcgccgaagaggtcagaaaacttgcggtccagtctgccgattcagcgaaagaaatcgaaagcttaattatagaaatcgtcaacgaaatcaatacatctctcggcatgttccaatccgtcaacaaagaggtggagagcggactggatattacgaatcagaccgaaacgagcttcaaacggatttctgaaatgacgaaccagatcgccggagaaattcaaaatatgaatgcgacggtagaacagctgacagcaggatcacagcagatttcaggagcttctgagcaaatcgcgtccatcgcaaaagaaagctccgccagcattcaggatatcgcggcctctgccgaagaacagctggcttcaatggaagaaatcagttcgtcttcggaaacgttatcccaaatggcggaagaattacgtgatatgacgaaacgatttaaaatagattaataggtcatagaacacccaaatgtgctgtttgggtgttttttttagtttttttaataaatcttttgtcctatctgacgatattagatttagcttttcaaagaaggagactgaaaaaatgaaacaactgatacattggatcaaacagccatccatcagcaagccgctgatcgcggcatttttagccgtattggtgcttccggtcggcatactcgcctacttcagctaccaaacggcggggagtacattagaaagagaactgacccacagcgcccagggaaatgtcagtgaactgaacagcgtgctggaaaacatgctcgaaggcaagctgaaagcgattgactactacagcgaatcaatcacaaaggaaaaactgaacacgaaaaataaatcggcactgctcgacaatatgaagcagtatgtcaccgtaaatggcgatgtcgcgtcaatttacgccgcgtctcgcgacaaagcgtttgtgaaatatccgtccgctgacatgccgtccgattataatccgctcacgcgcgagtggtatacaaaggcggttgaaaaaagcgggcagccggtgtttaccgagccttataaagacgctgcaaccggacagacggtcgttacgattgcccagcagacaaaagacggatcaggcgttgtggcgcttgatattaatctgggcgacctgctgaacgcttccgaacgcgtgcagatcggtcataaaggatttgccttcattacaacgggagataaaaaatacatcgcccatccgactataaaagcgggaacggaaggctccggagagtggacgaaagaagtgttttccaaatcaagcggatcgtttgaatacatgtttgaaggacagcagaagaaaatggccttcacgacaaacaaactgacgggctggaaaatcgccggcacattttttgtcagtgagatccatgacgcagcctcgcctgtcatgaaaatggcgctgatcatcctggcggtttctcttatcgtcggcggggttttaatcttttttatcattcgctcgattgcaaaaccgctcaaaaaacttgtttcgacatcagctaaaatcagtgacggcgatttaacggcagtcattgacatcaaatcaaaaaatgaattcgggcagctcagccaaagcttcaatgagatgtcggcctcactccggtctgtcatcggcgtcattcaatcatccgtcgaacatgtcgcttcttcatccgaagagctgacggcatccgccggacagacgagcaaggcgacagagcatattacactggcgattgaacaattctcaaacggaaacgaatcacaaagcgagaaattggaagaaagtgctgatcacctttcccaaatgaatgccggcattgccgagacggcgaatgtatcggcggaaatcactgaatccgccatccaaacctctgaaacggccggaagcggagaagaattagtggcgaaaacggtaggccagatgaaaacaattgatcgttccgtacagcaggcggaagcggtcgtaaaagggctggaaacgaagtcgcacgacattaagagcattctcaacgtcattaacggcattgccgatcaaacaaatctgcttgccttaaacgctgccattgaagcagccagagcaggcgaatacgggcggggcttctccgtcgttgcggaagaagtgagaaagcttgccgtacaatcagccggctccgcgaaggaaatcgaaacgctgattcaggaaatcgtcaaagaaatcgccacatcgctttccgtattccaagcggtgaatcaagatgtgaaggaaggcctcgatattacggatcaaacggccgaaagcttcaaaaaaatctcagaaatgacgactcagatttcaggcgccttgcagcatatgaacggaacgcttgagaagcttgcagccgggtcgcaaaatgtgacaaacgcggtggaggacattacctcagtcgccaaagaagggtccgccggcattcaagacatcgccgcctcagctgaagagcagctggcctccatggaagaaatcagttcatccgccgaaacgcttgcgcatatggctgaagaactgcagcaggtcacacggaaatttacgattcagtctgaagacgaagaacagctgtagcgagctgtttcttttcctcatctgaaaaaagcgatacactagtataaaagaagggagtggcagtgatgagattagaaggcaaaaaagtcatagcgcttgtcagtgacgattttgaagacttagagctttggtatcccgtctaccgtctgagagaggaaggcgcgatcgttcatttaataggagaagaagcgggccgttcatacaaaggaaaatacggcgtgcccgcgacggcggattacgattttaagagcctgattattcaggagtatgacgccgtgctcgtgcctggcggctgggctcctgacaaactgcgaagatatcccgaagttttggacatcatccgtacgatgaacgagcagaaaaagccgatcggccagatctgtcatgcgggctgggtgctcatatctgccggaattctcgcaggaaaaaaagtaacgagcacgcccggcatcaaagacgacatgacaaatgcaggggcacagtggctggatgaagcagtcgtaactgacggccacattgtatcaagccgccgcccgcccgaccttccgcagtatgcaaaagcgtttgctgacctgttagcgtccaaataaaaaacatccgcccgaatccgggcggatgtttttagttttgatcggcgggaaagacaattccgatttgttttctcgcttcctccataatgcttgccgtaatgaaagaacgttcaaatgtattttcggaagactcccgctgtccgtttcgaagaagattgatgaattcagccgtttcgtagtacatcgacggtttcagatcagggactgaaatgtcttccgtccgtccgtcacgatagcggatttccgcccgttccggtccgtgaatgctgtccagcacgatcgtgccgtcttcaccctgaatttccgccgaggcaaacgaatttgagattttcgaatgcatcagcaccgcttcaaatccgtcgtatgacagaatgaccgtgccttcgccgtcaacgccggatgctagtttatgaccggtcgcaatgacgtttttcggtttgccgaacaggacgacggccggataaatgcagtacacgccgatgtccattaatgaaccgttcgataattcaggcttaaacgcgtttagcaccgtaccgtttttatatgcatcatatcgtgatgaatattggcagtagcttgccgtgaatctcctgacgggtccgattttatgtaagtggttttgaagcatgctgaagttcggcaggaacgttgttttcatggcttccatcaagagaacgccgttcgttttggctgcgtgaatcatttcatccgtttcccttgcgttagacgcaaacggtttttcgcacagtacatgcttgccgtgttccataaaaaggaccgcctgctctttgtgaaatgcattcgggctggcgagatacaccgcgtcataggcttcgctttccgccatttctttcaggctggtaaaataatgagcagcgccgtgtttgccggcgaattccgccgcacgttcctcagttctggaataaaccgccgttaattgaaaatcatcaatagcagaagccgcctccagaaatcgttctgtaatccaattcgttccgactgttgcaaatcgaatcattgctatcgctccttctatgtattggcttacattatagctttttttctgagaaacataaatggaaaaaaggctggcagctaaagagataggaaaaattcccatagagaccggttattatttttcattacaggaacgatagtgtacaatttaagtaaaatacatatgatggaggaacaatagtggaaacattgcaaacatggggcggcagatttaaacagtttttcttagacaataaatttgtcttgtttttgcttgtattgctgctcatcggtctcaatatccttgtctttatgaagacatcatttattttcacacccattatcgtcctgctcaaaacgattgcgctccccgtcattttgacaggaatcgtttattatctgcttaatccgatcgtagatatattggaaaaaataagagtgaaaagagtctattccatcctgctcctttacctcattattatagggctgattacgattacggtcgtttcaattattccgtttttaaaggaacagatcatgagcctgatcgacaatctgccgaaatatgtggatattgttgaagatcagacgaaaagcctgatcggaagcgattttgtaaatcaggcgcaaaagacgatgaatatcaacatttccgatcttgctaataaagtatcggcgcaggcggcgacaattgcaaacagcacatttaccggggtcgggaattttatcggcgcgctgacggaagtgattatttcaattgtgaccgtgccgtttattctgttctatttgctgaaagacggcaaaaaactgccaatctatatcttaaagtttgtgcccacccgtctgaaagaacaaacgtatacgatgcttagtgaaatgaaccacagattaagctcctatattagaggacaggtcatcgtcagcttctgcatcgggtttttattatttatcggctatctgattatcggacttgattatgcgtcactgcttgcggtcattgccgcttgtacgagcgtcgttccgtatttagggccgaccattgctatcacgccggcgattattatcgcgttggtcacttcgccccttatgctgctgaagcttgcgattgtctggaccgttgtccagctcgtggaaggaaaattaatttctccgcagatcatggggaaaaatcttcacattcacccgattaccatcatctttgttcttttaactgccggaaagctgttcggggttgtcggcattattttagccatcccggggtatgcggtcatcaaagtggtcacgacccatctgtttgattggttcaaaatgcgttcgcatttatatgaagaagaaaaaaatgatgctgtatcgaagtcataaaatcggaacggacatgatatttattataagacaggctttccttcagaggagagcttctcttttgtaaatgatgaatgaagggaagaatgggatgacactatgggagatgttcacagcagccgttttaggaatcgtggaagggctgacggagtacgcgccggtttcttccacgggacatatgatcatagcggatgacatctggctgaaatccggaagcctgatgaatccggaagccgcaaattccttcaaagtggtgattcagctcggttcgattctggcggtggccattgtgtttaaggatcggatattacatttactcggcctcaaaaaaaacgtcacgcgcgatcagcagaagggatacaggctgaccatcgcgcaaatcgccgtcggtcttgttccggcagcggtgctcggctttttatttgaggatttcattgaccgctatttattctccgtcagaacggtcgcttacggattaattgccggagccgtgcttatgcttatagcggactggatcaataaaaggaaagaaacgatcgatacggtggacagaatcacctacaaacaggctttctgtgtcggattattccagtgtctcgccttatggccgggattttcccgctcaggctcaacgattgccggaggtgtcattgtaggcttgaatcaccgggcagccgcagacttcacatttattatggctattccgattatggcgggcgcaagccttctgaagctggtgaaatactggagcagtctttcttatgacatgattccgttttttcttgtcggctttatctgcgcctttgtcgtcgccctcttagtcgtcaagttttttcttcggctcattaaccggattaagcttgtcccgttcgccatttaccgtgtcatcctcggcatcattttaatcatgctcgtgcgataaacgaagaggcccccggagggtcttctttttatgttcgaaaaacgtctcaggaaaatatgagcaaactgaattttctgcttgaaattcatagaagagtcgtctataataaaacatgacgttacagcacggggccatagctcagctgggagagcgctacgctggcagcgtagaggtcaggggttcgagcccccttggctccatacctttaaacccttattctataaataagggtttttttgttttttcatcttctgcggcagcctctgtgttctgcttcatttctaacaattgaaaataaaggaaagagagaaaatgaaaaagaaaatctatcttatattatctctgtcagctgcactggcgctttttttgacagcgctttcgcctctttctcctgtcatcttcacgtctgcttcagaaaaaggagccatcaggcatgacatttataaaaaaggatatccgtatcaaagctactttgcgattcttcaaaaagaagaaggcggtggagaggccgggaacctttattatgtaaattggttcaattggaaagatgaaaccggacagacgccgcacgtatgttattcaaaaaaatcgtccgaaggcgagtacaaagtaagctgcggaaccggaccgtaatgatcaagagcccctctccaatgaggggctctttctgtcgagctgaatgccgctcaggctctccgtttaatatccccaatataacggcgtatcataatgccgatacggatcattcggataaggcgtatttggctgataaggcttattcatatcatgaatacccgtgttttcagactgtccgcagtatttatcggggcctatcacagttgattgccggatcggtgaaacggctttttcccactcatgctcattcagacagtacgtatgcgccatgatctccggcggcgtcagacggagaatatccgagccgtatatcacttcaggcgaaggggcgtcaaatatggccaaaagatgggttttgtctgaagtggcgacttcataatgccaccacccctgcggaatattcgccacttgccctggagagatcggataattccgtattttctgggtgaacggattcagcatcgacaccaccgcggaacccgaaatacagtacaccaattcagcggcgttttgatgggtatgcggttcaatcacatttgttttactcagaaagatatctaataatgaaatattttcaagcgtgtttaactgtttaatccccaatacattgataaagttccgagcatctttcgtaaaaaaacggctctcattcacatcataagtgaactgtgtattcggagacgtgtaatcgatatcggaaaccatgcaatcccccgctttcatctttaaacgtatattcccaaatatatgtgtccctgtttcaccgggtgataaaaaaggaggtgaaatccataaattccaaaaccaacacaatattgtgacggcttttttaaagattcattttagatatatcttttattcgaaatatctcttactataaagatatattgaaaatacatctttagaagggttgaggatgaacatgctggacgagagaacaatagacatcatcaaaagcacagtacctgtattgaaaacacatggagaaaacatcaccggacgcttttataacctgatgtttcaagatcatcccgaactgttaaatatgtttaaccaaacgaaccaaaagaaacagactcagcgcgcagcattggcaaatgcagtcattgcggctgcggcgaatattgatcaattagaacaaatcattccggcggtcagacagatcggccataaacacacaagcatcggtgtaaaaccggaacattatccgattgtcggaaagtatctgcttctggcgattaaggatgtgctgcaggatgccgcaactcctgaaattatgcaggcatgggaaaaagcttacggtgttattgcggaggcttttatcggcattgaaaaagacatgtacaatgaagccggatggcaggggtataaagaatttacggttatacagaaaacaaaagaaagcaaagatatcacatcattttatatcaaaccgagtgacggctcttcgcttcctggatttgaagcgggacaatatatcagcattaaagtgaggattgcggattctccttatacgcacattcgccagtacagcctgtctgatgcttctcgaaaaggcgcatatcggatatctgtgaaaaaggacggagcggtttcttctcatctccacaatgaagttcaagagggagataaacttgaagtcagcgcacccgccggagatttcaagctgtctgctgccgataaaccggttgttcttatcagtgccggttccggaattacgccgatgatgtgcatgctgaaaacagccgccgaaaaacagccggagcgttccgttacttttattcatgcggcgaaaaacggagagtacgccgcgttccgcaaagaggctgaacaagctgcggagaatcatccgaatattaacgtcatttacgtatacagtgaaccggcagaacaagaccgctcaggagacaagcctttttacagcggccggattgatcaaaccttcctggagcagcttcatctgaatcaaaatgctgaattttacttgtgcggatcagcgcagtttatgacgcaaatgaaagacatgattcttgcactcgggtttgactctgattccgttcaatatgaattgtttggccctcagctgagcatggcataacaaaaaagactcctcaaagaggagtcttttttatttgcgcaatgtgttctttctccgtctttttccctattttattgaaattttcatcaatgaccagtaaaattataaatctagtgattccggaattaaaggaaggttgatatgaaaaagaaagcaaagaccaaaagggtgcttgggtgcctttttgctgtatctcttatattcggattatttctggtatcaatggtgttttcgaaattcatagtgacggaagaaaaaccgcctgaagaggtggacgagcagcaggtctttattgacagcctttccgggcatgctcaaattttatatgagaaatatcatgtccttccgagcatcaccctcgcacaggccattctcgaatcggactgggggaacagtgagcttgcggggaaagcgcgcaacctgttcggtgtaaaaggtgattataaaggaaaacacgtcacgatgaaaacggatgaatttgaaaaaggaaaacgaaaaacgattcgggcaaaattccgtaaatacagcacgttttttgaatcaatggatgatcatgccaaattatttgtcaacggaacgtcttggaataaaaagaagtacaagcccgtcattgaagcggacaattataaaactgcggcggctgcccttcaaaaatccggctacgccacagaccccggctatgctgaaaaaattaaagatgtcatagaaacctataacctgaatgaatatgacaaaatcaatgcctctcttaaagcagttgatatgaaaggcgccatcaaagaccacgccattgaagacgtgtggtccaagccgtcaaaagagcggcattctattaaactggcatcggcgcaaaagtttaccggcgagcatattaaagtcgtatctgaaaaacaaaacggagaatccgtctggtaccaaattcaagtgaaagatgagctgatcggctgggttgaccaaaccgccgtccagttaagtgaagaaacataagcatcaaaaaaagccggcagcccgccggcttttttacattccttcagtttcaaaccttttaatatcacgtttatgccccatcagcacaaggcagtcacattcatgaatgacagtctccggagaaggggacagctgaatgtctccattatgtttcaaggcgagaatggtgcagccgaatctggcccggacgccgagatcaagaatggattttaaatgcagttttttcgtggctgaaagctccacaatgctgtattcatctgacaaatcaatgtaatttaagacattttcatctgaaaggctttgtgcaatccgcacgcccatatccttttcgggatggataatacgatcagcgccgatcttttcaagcactttgtgatgataatagttttgcgctttcacccaaatattagggatgttcagctccttcaataacagcgtcgtcagcgtgcttgcctgaatgttggcgccgattgctacgatgacatattcaaaatttctgatgccgagcgactgaagctcgctttcttccgttgaatttgcccgcacagcatgcgtggcataagaggagtatgcgttgacccgctcttcgctgatatcgaccgcaagcacctcatgccccattttaaaaagctctttacagatgcttccgccgaaacggccgagtccgatgacggcaaattgtttatttttgatttttcccaatcctcataactccttaagaaactgttttcgtcactccaaatacaacaaacaagaatgtactcctgtttcaagggtttgtcaatgcgcgggccggaagaaagaaaacagcacaaaaaaaagaccggctgacaagcgatgggcttgtgccggtcttttttcgcaattattagcagtcgcaaggctgtgtcggcggtgtgctgcgtttttgaacaacaattgtgtcctcagcatagaatttagagccgatgcttaatgatttattttctgcacggaacttatatgtacctgcagcaggcaatgttttattattaagagaaagcttaaattccgctgcgccgagcaaatcaatgtttaacggaagtctgactgttttgccgttattcagaatctgtctttcgcgtaaagcgtgtccgttgactgtatcttttgtagtagccgcaaatccgctaggaagggtaaattccataacgcctaagctcaggatcgtgttcggacggtacgtcaattcgatatcagaaaatgaccattcctgctggctggcacctgtatattttgcaaataaggtagcagtcgctttcgtggacatttccggctcgtgaacggttgagcccgactcagcggcgaatgacgctgtcggcagagaaagaagcaaaaccaggccgaataaacttgccatgacagttgagaaaaatttctgtttcattttaaatccccctaaaaaaaatttgctgattgttcttaaaaaagaacgaccatacctataaaaatttaccatcaattttaatggaagtaaatggggttatgttcctatattttctcaaaaataatcaaatcacgacaaaaa

SEQ ID NO: 29 - DNA, 33199 bp, Bacillus amyloliquefaciens
gctgcacccgcaatgcccgctaatgcatacagcgcgattgccttttgagaaaaatgaaaagcaggaccggacaataataaaggcacagtcgtccagaataagctgaaagctccaaatacaaacgcatgataaatggcacggcggcgtaagaccggagtcgtgcgcagcagcttccacattgaaccgagtaagacggtgtagcttgtgtttgctgttggttttctggcaggaagcacttttgataagatgattgccaggacaacacttaacgcggcggataaagcaaatatggcattccacccccatatatcagcgaccaggctggatatcggacgggaaagcataataccgagcagcaggccgctcatcacattgccgacaacccggccgcgtgcggcatctggtgcaaggtatgatgcgaacggaactagcacttgggccgcgattgatcccagtccgatgaaaaacgcagcagctaaaaacagtgttccatgcttcacaaatgctgtcagtgtcaaagcggctgcgcttagaaggagcgatacaacgacaagttttttgttttcgataatgtctcccaaagggacgagaaacagtaagccggcaacgtatccgatttgagtcagcgtgacaattaatccggcgctgcttggagaaagcccgattgccgcactaatgaatcctgccaagggctgtgcataataaagattagcgacaatgataccgcatgccgttgcgagaagaagggttaaaccaggtgaaattccctgatctgctgtttgtttgttttctttagccatatgaatgaactcctttttaagtggtttttatgatgcttgataaatgatttgctgattcatctcctttacgcagaggcttttggagtctgtgtttcatcaagatttccctcaagttattttgtaaactaaacgtttagttttattataagcaaatgatatactaaacgttcagttttgtaaatgggtttctgttttctttttttatacaggttaagtatactgaacgtatcgtttataattcgggaaggaatgattcatgtgcagagtaaacgagggcggccgcgcgatgaaggaacacataaggcaattctttctgcagcgtatgacctattgttggaaaatggctttgacgcggtgacagtcgataaaattgctgagcgtgccaaagtgagtaaggcaacgatttataaatggtggtcaaacaaggctgccgttatcatggacagctttctttcgaccgctacggacagactgcctgtgcccgatacaggatcaacagtgcaagatatattgacccacgccacgaatttagcaaggtttttgacgagccgggaaggaaccgttattaaggaattaatcggtgcggggcagctggatgcaaaattggcggaagaatatcgcacgcgatttttcaagccccgccgcctccaagcgaaaggccttctggaaaagggaattcaaaaaggtgaattaagagagaatcttgatattgacgttagcatcgatctcatttacggaccgattttctatcgtctgcttattacaggtgatgaggtgaatgattcttatgtgcatgatctggtgatgagtgcgtttaagggagttcagcctgcctgaaaaatacccggatcatgtgaaagagatgcagacttttgctgcctatgggcggaacataatcaaaaggccgaacaagttcattgttcggccttttctgattgatttgcgaaccgccgggcggccgccacgcaagcgataacgccggcattcaccgccgcaagttcccatcctgctttttcatggagaatcatggcggccagtaacagtccgaagaaaggctgcagaagctgcagctgtccgaccgcggcgatgcctccctgggcgagtccgcgataccagaatacgaagccgatcagcatgctgaatattgagacatatgcaagactgagcagtgcgggcgcgccgatgtttgaccatgagtccggcatgaagcagaaagacaggatgaacataaggggaagcgataaaacgagtgcccaagagattacctgccagttgccaagccgccgggagaggcgggcgccttcggcataaccgagaccgcacacgataatcgaagcgatcatgtacgtatcaccgagcggagaggattctcctccttgcagcagagcatatccggctacgaggatgctgccggcagccgagaaaatccaaaagaccggcctgggccgttcgcctccgcgcaggacgccgaagatcgccgtcgcaagcggaagaagcccgatgtagacaatggcatgagcggatgtgacatgctgaagcgctaatgctgtaagcagcgggaaaccgatcacgacgccgagcgctactgttattagtgaaatgatgtcgcttttggcagggcgtttctcctgaaaaatgaggagcagagcgcctgccaatataccggctatcgcggcgcggcatacggtgagaaataccggatcaaagtccgctacagccaagcgggtcgcgggaagcgagccgctgaaaatgagcacgccgataaacccgttaatccagccgtttgtagctttattcattttccaatcactccaatatatatttctaaacccattttcaaagtttataatgactataaactgaaattgaccttatacaaatggccagtttttataaaaagaagaatgccagtttggagggagtaaaaatggatatcacgccatttttaaatagagatctggatattccgctttatcagcagctttatcggcattttaaggaaaatatgcatcagggccgtcttcctaaaggactgaagcttccttcaaaaaggcttttgtcaagtcagctttccgtcagtcagacgactgtggagcgtgcctatgaacagcttgccgccgaaggctatattgtcagtaagccgagaagcggatggtttgccgattatgactcggacgccgtctatgtgaaaaagccgggcgcttcgcctgttcaaacaaaggcgaaggaagaccgccaatggattgattttcactacggcactgtggatgccgctcattttcctttttcggcatggcgcaaaagcatggttgcaagcttagatcaatacgggcatgagctttatcggcccggggatgatttgggcgagcttgaactgagaacgctcatttcagagtacttatatcagtcgcgcggcgtgaattgtcttcctgaacaagtgatagtcggcgccgggaaccctgctcttttgcaaatgctgtgcaaaatatttgaagcaaatctatccatcggatatgaagatccgggttatccgagagcgagggagatttttaaagccaatcacatgaagatcattccgatacccgtcgatgatgaaggagtctgtatccggaagctgaatgaagagcggccgcgtcttgtatatgtcacgccttctcatcaatttacgttaggaacgattatgccggtaaacagaaggattcagctgctgaaatgggcgaaggaacatcaatcgttcattatagaagatgattatgacggagaattcagatacaccggccagccgatcccatcattgcaggggcttgatcagcatcaccgtgtcatttatatgggaacgttttcccaatctctgcttccttcgctgcgcatcagctatatgattcttcctttgccgcttatcgaaaaaggcagggaaatcgcttctttatataaacagaccgtctcctgccacagtcagctgacgctggctcaatttatcaaaagcggagagtggcagaaacatattaacagaatgagaaagctgtaccggaaaaaaagagcggtattattagaggccgtgcggcgcgagctgggacaatacgtcaggattcgcggagaaaattccgggctgcggattttacttgacgttcatctgcctttcagcgaaaaagagctgattgaaaaggcggaggaacaaggcgtcaaaatctatcccgtgtctcttacctatcaaaaacaggtccctgaaaaaacagtttccctcggattcgcgggggtttctgaaaccgatatacaagaaggcataaaaaaactgagagctgcctgggtgctgtaaaaggcagctctcagtttgaaatactgaagcttgagtcaggggtgctgtctcagcagcaaaacgatttataggacgggcaggcggagcgcagtatcaatattttgcaaattgagccggacttgttcatttgtgttccacgggtgataccagcctttttccatcatatagcgtgagatttgctcgtgcatgtcaagggcttcttctaagtgccgggtgaggatcgctttcacttcaggcgttccggcttccgtcgccgccatcgcatagttcctgacaccgctttttgccgaattcaataaatccattgcgacaatttggtctgtcagcgcattcattcccgtcaagtattcaataatcggattcattcgtcattcatctcctcattcatgctgtgcatcagataaaattgaggcaaattcctgcaattgccttgttgatgtatccacatcctgctgcatgatttctttcagctgcggatcggatacgagcgctttcatggttttagatttcgtcagacaaagtgacttaaaagaagccatctcctgaatttcgagtaattcatgtaaggcgctggtcatttctgtagcctccgttctttaaggtttgagtacaactttaatacaatcatctgttttcgtgtcaaacatctcatagccgtgcttcgcttcactaagcggaatgacatggcttacaacatcgcccggatcaattttgccggttgacaccagttcaaacatatacggcatatagtggatgaccggagcttgtcctgatcggatattgacgtttcgctgcatgatatcgccaaggggaaacccgttgtatctgccgccgtacacacccgtaatctggatcgttccgccttttcgcaccgcttgggacgcgatgaccaatgcgctcatcgccccgccctgaagttttaatccgctggcgaggaactcaagatccgtcatttttccgtccatgccgacggcgtcaatgaccacatcagcgccgcctttggtgatttccttcaggtagctgcccgtattttcgtggtcttcgaagttcacgatttccactttattcgtccgtttcgcatgctggagacggtagttgacatagtctacggctattacgcgtttcgctccctttaaccagcagaatttttgagcgaaaaggcccacgggcccgcagccgagaacgataactgtatcgccttcttttacgccggcattgtcaacgctccaaaagccggttgtcatcgcatcggaaataacactcagtttctcatccggttcttcgcatgtttcgggaactttaaaatgagtaaagttcgcaaatggaacgcgcaaatactccgcctggcctcccggatagccgccggcatttcctgaatagccgaaataagcgcctatatcgccgttctcatttgattgatcacattggctttccaggtgatttttacaataaacgcattctccgcaggcgatattaaaaggaataatgacgcggtcgccttttttgactttcgtcacgccgggaccggtttcttccacgatgcccatcggttcatggccgatgatgtagtcttcctgcaaattcgggatgagtccgtggattaaatgtaaatctgatccgcaaattgccgtacttgtgacttttataatcatgtcatcgtgtttttcaatcttcggatcaggcacgtctttgacaacgacgtttttcactccttgatacgttacggccttcatgctgtaatacctccagtgttagtgttcatcaggtgtgcggtcaaacatcccttttctgtttgtttcaacgggaaacaggttcatgcttccgaccatgagggtatttttcgcagagagctgatccaatttatactgttcgctcagatcatgcgggtgaaaccactttttgctgaccatcaagtctgttatctcctgatgcatcgcgattccctgcatgagctgtttgcgcagcaaagctcttacatcaggtgaagcggtttctgttaaagcgacggcggtatttctgacgccttcttttgcccgtaaaagaaaatccattgcgaatgtcatatctgcgagttcagggacgtgtaatgaattgattggatctaaatggtcatgattcaacgatgcttaccttcctttcaattgatgatcgaagtcggccggttttgaggaacaggagcctgaaaagatgcccgttcataaaccgcctgcagatcagccaggtcttgcgaggcttgctgaacatctttctccattaacgttttcagatcctgatcaaacacaagcccttgcatgagcttggatttcgcgacacaaagcgtcttgaagttaatgatttcatgtaagtccaacgactcgtgagccgctaattcacgcttatccataatcgtctgaaacctccctttgtagaaatacgtagttaatttcccctgagaaaagaggtctagtcttacaaattttgtttatcagaaaagcggagaaaaagcctgacggtgcatcaaaaaaggaggaagcacaatcgcttcctcttgttcacatggaatggctgttggtgtcatgaacgtttttctgatgcgcgggcggttttgccgcgcgggagacgagaccgctgaaacccggaaaaggtcataaaaaagatatgaacaaaagcagcttgcgcacaatcccgcaggctgttttttctttcacccgtcatgcaggaacagaaggggaaggtgagaagcaggcacttatggtatgatgacaaatagaataaaacctcgtgaggccggtcggctaaaaggaagtgaacagagattgtttggtacaaaacatcaagaagactatgtctcccgtgacagacgctcattgcatatgcttgcgcttcgggtgcccggtctggcgtttatttttatggtatatgccgcatcagtctctttgcagtacatttatgaaagctggacggtttttttgctgctgttattcacgatattgatcgtcatttttaccgtgctgcattggcattcccatcgctgggtcaagaaaaaaacgtttctttatttcatcatacagggatttatcatatatacatcggctaacttgatggccggcggttatatcgcggtagtcgtcggtctctatgcctttttaatcgggcagattatcggaatggcggataagggaaaaacgctgctcatactctatcttttcattttaatgtccatagcagccctgcaccaggagcatccgcatcatctgctgcgtttcatcgttatcgccgctcccatcatgatcgtgattatcacgtatgcggcaacatttttcgcgcaagttgatgaaaaaataaaaacacaggtgacgcttgaaaaattagagctcgctcaccggcaagtgaaacagctgacgcttcaaaacgaaaggcagcggatggcgagagacttgcacgatacgcttgcacaagggctggtcagcttgcatatgcagcttgaagcggtgcaagttcatctttcgaaagataacactgacagagcgaaagacatcatcagccagtcaatggacagagtgaagggcacattggctgatgcgcgctcggccattgacaaccttcgcagcaaatcagaagagatcgggttcttaaaagaaagcatcactgaacaaatcaaccattttacagaagcctccgggctgtcttgttttttagagtacagcgtgcatcatgtgcttgacgttcatacggcggagaattgccattacatgatcggagaaggcctgacaaacgccgccaagcatgcagaagcaaagaatgtctgggtatccgttcaggaagaagagggacaggtccgcataaccgtcaaagatgacgggaaaggctttgatgccggaacagaaatgagaaaaagcggacattacgggctgcttgggatacaagaacgcgtcaatatgatgaacggcattttccgtataacaagcgccagatcagcggggactcaaattgagatcatcataccaattcaaggagaggcagaacatgtataaagtgttaatagcagatgaccatcttgtcgtcagagaaggtctgaagcttttgatagaaacaaatgaacattacaccataacgggagaggcggaaaacgggaaaaccgccgtccgcctcgcagaggaactaaagcccgatgtcattctcatggatctgtacatgccggaaatgagcgggctggaagccattaaacagataaaagagcattctgatgtgccgatcattattctgacgacctataatgaagatcatctgatgatagaaggcatcgaatcaggcgcaaacggttatctgctgaaagacacaagctcagaaaccttatttcatacgatggatgcggcggtcaggggagaagtgcttctgcagccggacatcttgcgccgtttccgggaaatgaaaatggaacgggcaaatgccaatgaaacacagctgacggaaaaggaaatcatagttctagaagccgttgcgaaaggacataaaagcaaagcgatcgccttcgatttaggaatctcagagcggacggtaaaagcgagattaacatcgatttataacaaattaggcgctgattcgcggacggaagccgtcaccattgccatgcaaaaaggcattctgaaactgaatatataatgaaaaactgcccaaacgtacatgcccctatgtacgttttttttatgtgaatgtgaactacaattaggcagaaagtaatgattggagaggagtattcgatgtctggatttttatataaattagggggatggtctgcccgcaaccgattaaaaatgatcagtgcgtggctcgtgatactgatcgcttcggttgtgatcgccatctcgttaaaacctgctttttctgatgatatgtcaatacctgacacaccttctgaaaaggcaatggatatgattcaaaaagaattttcaaagggtcccgataaaggaagcatacgggttattttcggtgctgaagatgggaaaaaactgacgtcaaaatcagaaaaacaagcgatcgaagagacattaaagaagatcaaaacagatcattcagtcgcttcgattgcaagtccttttgagacaggaaccatttctaaagacggatcagtggcatatgccgatattacgtataaaaaagcggcggatgacatttcggccgcgtctgtttcacatatcaaacacagtctgtctgccgcaggagacaagggcctgcagacggagctcagcggtgatgtgccgggggccggtgttgaagtcggcggtgtatcagaaattatcggcgttgtgctggcattcgtcgtactggctattacgtttggttcattagtcatagcggggctgccgattgtcacggccctgatcggattaggcgtaagcgtcgcgctgacgttaatcgggacacagttctttacgatagcctcggtcagtctctcattatccggaatgatcggcctggccgtcgggattgattatgcgctgtttatctttacgaagcatcgtcagtttttgggcgaaggtgtacaaaaaaatgaatcgatcgctaaagccgcgggaacggcaggcagcgccgtcgtttttgcgggactgaccgtgatcgtcgcgctttgcggattgaccgttgtcggcattccgttcatgtctgcgatggggttgacagcggcactcagtgtgctgatggctgtattggcatcagtaacgctggtgcccgcagtgttatcggtcgcagaaaaacggatgattccgacatcaaataagaagaaagaaaagaaaagcgccgacacgaatgcctgggggcgctttgttacaaagaggcctattctgttaagcattttcagcattattcttttagccgtcatcagtctgccggccatgcatttagagctggggctgcctgatgcgggaatgaaagcgaaagacagcccggatcgccgcgcctatgatctgttgtctaaaggattcggcgaaggctttaacggcaagctgacaattgttgccgatgcaaaagatgttaagggcaataaaaatgaagcattccaagacgccgtgaaagaaatgaaggacttgcataatgtggcgagcgtcacccctgccatgccgaacgaaaaaggggactatgccatcattacggcagtgcctgaaaccgggccgaacgatacggcaacgaaagagttagtgcaggatatacggaaactgtcagacaaaaacggcatccgtctgctcgtcaccgggtcaaccgcggtgaacattgatatttcagatcggttaaacgatgccattccggaattcgccattcttattgtcgggtttgcatttgtattgctgaccgtcgttttccgttctcttctcgtgccgcttgcggccgttcttggctttttgctgacaatgaccgcaacactcgggttatcggtattcgtcctgcaggatgggaatttcaccggcttgctgagcattccggaaaaaggcccgattcttgccttcctgcctattttagcaatcggtattcttttcggactggcgatggattatcaagtattccttgtcagcagaatgagagaagaatatgtcaaaacaaaaaatccggtacaagccatccatgccggattgaagcatagcgggcctgtcgtaacagcggcggggctgatcatgattttcgtcttcgcgggatttgtcttcgctggggactctatgatcaaatccatgggattagcaatgaccttcggtgttcttttcgatgcgttcattgtaagaatgaccatcattccgagtgtcatgaagctgatgggacatgcggcctggtacttgccgaggtggctggataaaatcattccgaacgtggatatcgaaggccataagctgacacaaggcaaaacaccggagaaaccggaagaataaaatgaaaaagcagatcgttttgatctgctttttttatgtgctgaccgcatccatgaaaagagaaaaaagctttttcatgtcctcatgtttttttgtcagcatttcgggatgccattgcacgccgacgacaaataattcacccgtccgttcaatcgcttcaatggccccgtctttcgcataagccgcggctttaaacgaaggcgccgtctcttttatgatctggtgatggaatgaattcacccgcgcagaatcgccaaacaaagaatggagacgtgtccctttttcaaaagaaacatgatgggtttttaacggcggatctttttcttgatcgtgcttgatttcagcaaatgaagcgtgtgtcagatcctgatataaagttcccccgtaagtgacatttaacatatgcatcccccggcagattgccagaatcggcttctctaatgcaaccgccgtgagaatcagctccttctcgtaggcgtcccgatcaggaaaggtctttcttaaagcctgtaaaggttcttcgccgtaaaacagcgggtctatatcctgaccgccggacagaatgatcccgtcaacatgagagacctgttcctttaaaagcgccgtctcttgaatcaccggcaatataaacggcacaccgccggcctcagaaacagactgaatataatcattattgacatatgcccgattataacccgggaaaggaccggattgatcagccataatgtttcccgtaattccgatgcgtttggccattcttcgtccccctgaactatgctcataataaatctgaacgtaggttgtacaaatcagtttgaaattattcttcatgatacgtgagctttccaaaacaaaacccgtgacaatcacgggtttttacattcatttcaatttcttgatttcttccgtcagctctttgaatttttgatcaagctcacgatattgtttatcagccggagtcatgaagctgagttttccgaggacttcctgccgttcggtttcaagctttaatcgcagttcttcagcatcgtccctgacggagggagattctttccattgttttcggacgctgccgtttgagatatcaagccggatgtccgtcgttttttcgacaaagtaacgatcatgagatacgatgatgagcgttccgtcgtatcgggccaaagtgtcttcaagctgctcgcgtgacggcagatcaaggtggtttgtcggctcatccagaatcagcacatctttctcttccagaataaacgccatcagtttgcatttgacccgctctcccatgctcatcttgccgatgggttccgtccattgcgctgcggtaaatcctaaatgcttcatgagggattgaacatttccccttgcttcgaacgtttctttgtaaaaaagctgttcgggggttttatcaagcggaaggtcgaatacttcctgggttaaatatcccacgtttgcagacggagaaatccatatgccgccctgcgctttttcctgaccgaggatgaccttcaataatgttgttttcccgctgccgttcgggcctgtaatcgcgatcttttcaccgtgcatcacagtgaaattcacatttttgaaaagcgttcggccgtcatatgactttgtgacatcacttacttctaaaaaacgctttcccgcttttttgcgatgctcaatggaaaaacggacttcatactccgcttcaaccggttctgctttcgctttttcaagctctttttcaagacgcttctgctttgatttaatctgggcgtccgtgcgttttgcttttacgcgatggtattctttaaatccttctattttcgttgattgggcatgggctttttttgaccaggcgctcagctcgttcatttgagcttcaatccgtctgatcatatgctgctgattctcatattcccgctgctgtgtcagccttctctgtttgcggacctccatatagcttgaataattccctttatgctcaatgagtttctttccttcgatggcccagatttttgtcgccgctgcatctataaaagcacgatcatgcgaaacgaaaataatggtgcctttgtaattcttgatctgatttagcagtatttctaaactgtgctgatcgaggtggttcgtcggctcatctaataacaaaaggctgcttgaggaggagaaacctttggcaagacgggctttcaatttttctccgccgcttaattgcgaaaaggcgcgtgcgggcacgttccacttttctaacaaggctgcctccgcaggctccggatggccggaatcataagcttccgtttcttgttccaccatatatatgttcacatcttgcatcatctggatctgtccttgtgacggcgctttttgattgcagatcaattgcagcaataacgatttgccggcgccgtttttgccgataacgccgatgatgtcaccttgctgaacgctcgcgctgatctgttcaaaaaggggaacgctgttgatttcataactgatgccgcttaactttaacatttctttcatatgtcaatccctcgcttttaagggaggacaaaaaaatcctcccaattgatttggaaggattagccgtacctgtgcatgatcaaataagctatttttacatagctttcgtatcgtatagaaaatgggcagactaatcctattttttctgatttgaaatatttgatttcaaacggtcaaaataagattagttaatcattgtccacccatcatcccttcgtatttgttacgaacagtgtagcacacacttatctgtaaaagcaaagggtataagcctttttattccagattggagacttcccactcttcttctaaaacggcataataatattcatcccaccattcattatcatgggggatgcattttttaaaaaagccttcccgtctcatcccgatcttttccatcacccggtgcgaagccgtgttttccggctgacatgtcgcaatgatccgatgtaatttcatcttgttaaacccgaatgccagcacggcgcgcgccgcctctgaagcatatcctttgccctggtattccgggtgaaacacccagccgatttcatacgtatgatcgccaaaatactgaaaaaaaacaatgtggccaatgaccgtttcctcatccttcaataaaacgggaaacttcccggcatgttcacccctgttttcagtaacgaatttcctggcatcatcttcggtaaagacaccctctggtatatatttcatgacattcggatttgaggtgtacgcatagacatcctgccaatcttccggttcaaatgtgcgaatgacgagcctgtcagttttgatattcattttttatgttcctccatcaaaaaaggtttcatttactacttctactacttcgattgaaaggtgtaaaaacctttgagcggggaagagccgaataaaaaaagcctgcagctatacactgcaggcggttatttttcatttgcggcgggcaggtttgtaaacccgaattgccctccgacagcttcttttacttcatgaataacgataaatgatttcggatcaattttttgaacatgttttttgattttcagcaattcgttctttttaatgacgacatagataatgcgcttgtctttgctgccgtaatacccgtatccgtaaaaaatcgtcgccgcgttgccgtactcggaggtgatggctttggcgatttcttcgtattggtcagacataatggtgagggcttttttattatggaaaccctcaatgacaatatcgacgattttggcgcatagataaacgaagataaacgtatacagcatatgattgaggccgatcgctaaaacggatgcgaaaatgatgacacaatccatgtaaaacatgcttttcgagatgttaaagccctttgtgtaatttaataaatacgccaaaagcgtggttccgccggtagatccgtcagcgataaagatcaatgccagccccgctcccatcagcagagcgccgaatacaatcccgagcaccatgtcgtgcacgccgaacggaataaagctgacgatgctgagaaaaacagaagtcattcccgtcccgagtatcgtgtataaaatcgtttttttcgttaaaaatttataagccagcccgataaaaatcaaatttacaaccagagtcgtaatacttgcaggtatatgaaaaagataatataacacgagagcgattcccacggtgctgccgtcccctaaatgattcgggatgacgaaaaattccacggacgccgcgataagaaaggctccggccataatcatcagtatatccttgcaaatgttcttcatgtgcaaacctcctccgcagtcaaaaatatataaaaaacaaaaacgcctcaaaaattatccagaagaactaaataatttttaagacgaatcattcacaatctcgtttgttcattcagtaaagaatgatcagcttcaatatcgaagattatatagacaccttcacatcttgtcaatgccgtgaaaattgatttttctgcagtgtatatgaggtttaaatcaagttgaaacgaggaattatatcagaagagttttcatttctgctctatcaataagagaaatgtaatgagagacaacgaagaagggatgatgacattggaacgaatttttatcagtccggccaaatacgtgcagggaaaaaacgcaattgaaacgatcggcggacatctggagggcgttggtgaaaaagccgtcgtcatcgcggacaaaaccgtatgggatatcgcgggccacaaggtgacggctgaattaaagaaaagcaatatttcttctgaagaggcggttttcaacggcgaagcctcccaggaagaaatgaaaagaattgccggcatcgcagaaaaagcaggcgcgactattgtcatcggagtcggcggcggtaaaacgcttgatacggccaaagccgtatcagatgaaataaacggctataccgttatcgtgccgacggccgcttcaacggatgctccgacaagcgggctgtctgtcgtgtattctgaacaaggcgcgttcgaaaactatcgtttctatcataagaatcctgacctggttctggtcgatacgaaaatcgtcgcggaagctccgccgcgctttttagcatcagggattgccgatgcgatggcgacgtggatagaggcgcgcagtgtcatcgccaatggcggtaaaacgatggcgggcggaattccgacaatcgccggagaggctatcgcggaaaaatgtgaagcggtattattcaaatacggccgtctcgcttatgagtctgtgaaagcgaaagccgttacgcccgcattggaagcggtggttgaagccaatacacttctgagcggactgggatttgaaagcggcggcttagctgcggcgcatgccattcataacggatttaccgcgcttgaaggtgaaatccatcacttgacccacggtgaaaaagtggcattcggcacgctcgttcaattggcgctggaaaaacgctcgcttgaggaaattgagcggtatatcgcgttttatatcagcttggggctgcctgtcacacttgaagacatcaaattgaaagacgcatctaaagaggacattatgaaagtggcagaagccgcgacgattgaagaagaaacaattcatgccgcttttgacgtgacggctgacgacgtggcggatgccattatagcggctgatcaatacgcaaaagcatttaaagaaaaacacgcgtaaaaccttttaccgcgtgacccggaaccaagggctgttacagctcttggttttttttatgccctttgaaaacttttaaaaataaagaaaaaattatgatacaatatacaaatgttttgagagattgacaaaggaaaggtgggaacgatatgctgcataatccgaccggtaaggagcggcttgcgctggcttttcttctcggaatgcttgcgatactggggccgctcaatatagatatgtatctgccgagtttccctgaaatcgctgaagatttaagcgcccgcgcatcgcttgtccaactcagtttaaccgcttgtctgatcggactgacaatcggacaggttgttgtcggcccgttaagtgacgcgaagggaagaagaaaaccgttattactatgtatttttttatttgcgttgttttctctgttttgcgcgcttgcaccgaacattgtaacattagtgattgcccgttttcttcaaggattcaccgcttcggcaggactcgttttatcccgtgcaatcgtcagagatgtgtttacgggaagagagctttctaaatttttctcgctgctgatggtcattaccgccgtagcgccgatggtggcgccgatgacgggaggcgcgattttactgcttccgtttgcatcatggcatacgatttttctctttttaacgtttatcggttttttgcttgtgttcatcattgcgctcaagctgacagaaaccctgccgccggaaaagcggattccgagctccatcggaaattccgtgcggacaatgggaagcctgctgaaggatcggtcatttatcggctatgcgctgacggtcggttttattcacggcgggagctttgcgtatgtctccggaacgcctttcgtgtatcaggatatttacggagtatcgcctcaggtattcagtgttttattcggcataaacggtctggcgatcattaccggaagctttatcatcgggcgtttcggcgggatcattcacgaaaaaagcctgctgagaatcggcgtgattacagcgatggcggcgactgccgttctgctcgtcatgacgagcattcacgggccgcttgcggcactggtgatttcaatttttatttatatgattacgatcggcatgacgctgacaagcacctttacattggcgatggaaaagcagggacaccgcgcgggaagcgcaagcgcactgctcggcatgcttccgcttcttctcggttccatcgtgtcgccgcttgtggggatgaatgaagcgacggccgtgccgatgggggcaattatgttcacgacatccgttatcggttccatcgcttttttcgccttaacaacaaaaccggagaaagcaaaaaaggagtgaaatgattcactcctttttttgatgcccgctattcatatttcttcagcacgatcgccgaattatgtccgccaaagccgaatgagttggaaaggccgatcgttaacgattgctggcggggcccgtctgctacatagtccaaatcacatgccgaatcagggcgctgcagattgatcgtcggcggaatgatgccgtgtctcaagctttctgtcagagcgatggcttcaacgccgcctgccgcgccaagcatgtggccgagcattgatttgttggccgtgaccggaatgtcataggcaagctccccgaataatgtcttgatggccaacgtttcagaaagatctccggcttttgtgcttgtcgcatgagcgcttacgacatcaatgtcttccgctgaaacgttcgcctttttcaaagcgtttttcatcgccaggtatgcgcccgttccttccggatgggaggccaccatatgataggcgtcagagctcgcgccatagccgagcacctcacaaaggatcggggcatttctgccgattgcgctatccaatgattccaatactaagatgcccgcgccttcactcatgacaaacccatcgcgatccgcgtcaaacggccggcttgccgcggcggggtcttcgtttctcgctgacagcgcgtgggcattgccgaagctggctaatgacaaattcgtaatcgccgcttccgctcccccggcaaacatgatatctgcgtcatcattccgaatggcgttgaatgcttccccgatcgacgtattgccgatggaacacgcggtgacgggagaaagtgaggggccgagcgcgcctaatctgatgctgatttgagcggcggccgcgtttgagatcatcatggcgacaaggctcgggctcacttttcgcgctccccgttcatttaaagtatgaacgttctcaatcaaagtcgtgatgccgccgattcccgagccgacgtacacgccgaggcgttcacggtcaatctgatcgagctgaatcccggagctttcaagcgcctgttccgctgccgctagagcaaactggctgaaacggtcaagccgtctcgcttcttttctgccccatctttcttctgcgtcaaaatcacggacggtaccggctatttttgtctttgagccggagacatcaaacgaatcgatgaaagagattcccgattttccttccgtcaggtgtttccaaaatgtatgcacatcattgccgagaggtgaaatcactcccattccggtgatcacaactcttttcatggtcattcctccttcggtatgtatttattgtaactcgcaattatcctattacaagttgtagattatcctagtataatgaataccagggtaagagaggagagattcggtatgataccagaaggaagattgcaggcgctctcagagtttttaaaaacgcagcgggccaaaatttctccgcagatggccgggctgccgatgggcacacggagaagaacgcccggactccgaagagaagaggtcgcgcaattagccggcgtaagcaccacgtggtatacgtggctggagcagggcagagacattaaagtgtccgcagccgtattggacgccgtttccgatgccctgcagctcaacaaagatgagagaaattatttatacgcgcttgccattgaggagggcgtgaagcagccgtttaccgcggaggaagaagcggttatcagcccgtcgctttcaaaaatcctgcaggagctccgttattgccccaccattatctcggacaggcggtgtcatatcgtgggatggaaccaggccgcggctcacgtgtttttagattttgaacaaattcctcttgaaaagcggaatctcatagagctattgttttccagaaaagaattaagaagtttagccgtgaactgggagcactttgtgaaaggattcatcgccattttcagaacgtattacggccagtatgtagctgatacgtggtattctcagtttatagaagaaatggagaaaacgtattcggaatttcatacgctgtggaatgagagcgaagtcagctcggcacccgaagtattaattgagttccgccacgcgaaggcgggaaaaatggtctttaacctgacttcatttcaggttcagggcaacagtgatctgcgctgcagtgtgtatacgccggtagatcataccgaaacggaagcaaagctgaaaaagctcttcgaaaacaggtgaagaacagaaaaaaacgggaggcggctgcctcccgtttcagtttaaaataaaagcatgagaccggcgatggccggtgttaaaaaaatggctgatttcagaatgactttcggcacgaggttggtgaatttcgcgccgacatatgcgccgcacatcgttccgatcagcactttgaccaacagcatataatcgacaaatccttccgtcacataaccgagtcctccgccgaccgcaagcggaataatgacaagcatggtggtgccgaccgactggcggatggataagcgcaaaagaatcattaagccgatttgaataaaaggggcagaaccgatcccgaatgttccggacaagattcctgcgatgacaccgagtacaacggctttcacccatatgttcagattgctttgccgtccggaatcttcttgtgtttcttttacaataaataaccggactaaaataagcagagcagataaaaacagcatgcccgccgtcaagtaatgcagcaaatctgcggggataagggaagtaagccttgccccgaaaaacgaaccgaatgccgcaaaaacgccgacgatgagaccgattttcatctgaatattgccttcacggtagtggctgaaagccccagataaacttgtgaaagccattccggcaagggaggtgcccaacgccgtatgaatcggtacgtgaaacagtatagttaaaagtgcaatgacaaaaccggctcccccggcgccgataaacccgagaataatcccgagaagaaacataacgagtataataaacacaatcttctcctccatttagatgcctgatcaccatgttccgctccgctgtatcaggcttttaacaatcgaccgtcgaccgtcgtctaatatctttatgttacctcaaatttaatgtattggcaagaagccgaatcgcttttatacagagggtttacagctctttcaccatcactttttccccgtttgagtccagctctccattgaataagaagccgaatttttgataaagccgcaatgcgtgcacgttatcttcaaacaggcttaaataaatccgtctgcaatcatatattcgaacgagatggcggataagggcatcaagcaacagcttgcccaatccccgtccctgatagcgttcatcaataaaaaaacgatcaagccacactctgccgttttcattttcctcatcatattccggaaaccatccgtacatggaaaagccgaccaattccccgttaacataaagaccggccggctgataatgccggcaatcctcagcatcttgtaagcactcttccgcggtttcaataaatgaagtctggctttcccttacatgaagcgccagtatatcggcacggtttttttccgtgactgctctgatttcaatcgtcatacttgatactcctcttccgctttttttgagacggtaaagcttgcagtgcgtaagccatttgtgaatcagccttctctgatcatcataaaggatatggttaccgtatagtcaaggaggcattatgagcgaagacgtcagaaaatacttcacaacgggtgaatttgcaaaactgtgccacgtaaaaaaacaaaccctgttccattatgacgagatcggcctgctttctccggaaatcaaaaaagcgaatggatacagatactattcctatcatcaattcgaactgttccaggtcatcggtctgtttaaggaggccggcgtgcccttgaagcagatcaaaccgctcttaacagacaaaacccctgagggtatcatcacgcttttaaaagagagatcttcagaaatcgaaagcaaaatcaaaaagctggagcacctgcaagggatgattcagacaaaggtgaagctgaccgaacaagccttggagacagacttttcctccgtctcattgcagcgattagatgaagagacacttatgataggacgacccgtactccatttgccagaacggcaatatactgccgccatttccgaattgatccgctatatgcgggtacatgggctcgatcaggggcatccggtcggcggactgtttgcgcgggagcagattctgaaaaaagaattctacaactacacccatttttatatgaagacagatgaaggcatcgagaatagagacctccatatcaagccgaaagggctttatgccgtcgggtaccaaataggggatgaagcggaagcggcttaccgcagcatcatgcagtttattgaagagtatgggctggaaatgggcgattatgcatatgaagaatatatgcttgatgaggttgtggcggacgggtttgacaatcagatcacaagaatccagctgcaagtccgcaatccataaagccgatgccgccgttcatttacgtcttttaacaaaccttgtataatgagaaaatcagattgcaattgaggtgaaacacgatatgtttctagcgcccttatttgaacatgatgtaccggcagcacttctccgcccttaatggaggaaagtgactgcgcttctctccgttagggcatataacgtgacctaatatgataacggagggtgcatcaaattgaaaaatacattgttcggttcgatttatttggcattggccgccagtatctggggcggtatgtatgtcgttgtaaaagttgtggtagcggtcattccgccgcttgaactggtatggctgagatatgcggtggcgcttctttcgcttttgattctcagtttgtttacacaccaatcctggaaagttcataaacgtgatttattactgatcgctgcgatcggattgatcggcaacacgatttcgatcgtcacgcaggaaatcggcacgaaattatcaaccgcgcagatgggtgcgattattacggcatccactcccgcatttatggttgtatttgcccggctgatgttgaaagagcggttaacgctgaaaaaaggaatatcgacagggctggcgacgatcggagtattgctcattgtggggaacggagatctcgatatgtcgagccagctcggcggtctctcgcttctggctgcggcgctgacatgggctttgatgtctgtgctgatgaaacgggttcccggccattactcaccgcttgtggtcacaacgtattccatttgcgtcgcatttgtcatcctgaccccgtttacagcgggcccgcttcaggagattcctttgtctcagcttgcccggcctgagatatggggcggacttttatatttgggtgtgatctcaaccgcctgcgcgttcatgctttggaatcgcggattgcaattgctgaatgcggcaagcggcggtctgtttttcttctttcagccgctttccggaacattgctcggctggctgctgctgggagagacgatcggaggaaccttctggatcggagcggctcttattgtttcaggcgtcgttcttgtcatgaaagaaaaatagaaaatgaaaaaaagccattcagcaaatgaatggcttttttctgttttcccggcaggattcgcccctccataaacagaaaacaaggagcagaaacggatcatgggcaccggtactctcaaggtgcaatacccggaccctcagggtttcgtcaattaacataacgggcggtgaaaaaatggagccaaaatggctagattgggcaaaacagcttcaatccgcggcgcaagcggggctggcttattccaaagacatatatgatattgagagatttgaagaaataagaaaaataagtgtggatatcatggcgcatcataccggcatcgacaaaagggtcataaaagacgtattcgccggtgacacgggctaccccactccgaaagttgatatcagagcggcagtttttaaagatcagagcatattaatggtaagagagaaaagcgacggcagatgggcgctgccgggcggatgggctgatatcgggttttctccgggcgagaccgctgtcaaagaagtaaaagaggagtcgggaatcgacgtaaagcccgttaaactgttagctgtaatggataagaaatgccattcgcatccgccgtccgccgtccacgtttacaaagtgtttatcaaatgcgagatcatcggcggccggctcagggagggaacggaaacaagcgcggcaggcttttttgcggagacggaactgccgccgctatctgaagcccgcaatacggaaagtcagattgaaaggatgtttgcatatctcaaacatccggacgaacccgtttattttgattaagacagcaatcagaaagaaaagggggtccgagtataatgaaggattcaattaaacagcaggcgcagcggcaatttgccaaaaacgccgcgaaatatgtgactagtccaggacacactgcaggagaggatttggcgtatctcgtttcagcttccggtgccgaaaagcatatggacgtgctggatatcgcgacgggaggcggacatacggctaacgctctcgctcctctcgtacgatctgttatcgcatatgacctcacggaagaaatgttagccgccgctgaagcatttataaccggaaacggatggacgaacgtgtcattcgaaaaaggcgatgctgaaaagatgccgttttccgatgctgctttcgatatcgtcacatgcagaatcgcggcgcatcattttcccgatgtcagagcctttgttcatgaagcgtttcgggttgtcaaaccgggcggcagactgcttctcattgacaataccgcacctgaaaaggatgaatatgaccatttttataatgacattgaaaagaaacgggatcagagccactttcgggcgtggaaaaaaacagaatggctccgttttctggagacagccggcttccggattgaatccgctgtctgctttttgaaaccatttcaatttaccgtctggtgtgaacgggcaggcctgactgaagagaaagccgcattactggaaaaacagatgctggatgctcctcgtgatatacagcggtttttttctgtagaaaagaatcaatcaggccgtattgcgggcttcacaggtgaatcggcctgtttctgcgcggtccgtcccgtctgagacgaaaaaaaccgctgtgcagttttcctgcccgcggttttttcgtattatctgttcttgatttgagaaataacagcggaagtgacgtcttccgctgaatgttttccgccgacatcaggagtcagaatgccgctgtttgtgaccgtttcaatagattgtaagaggagatggcccagttcctcttctccgaatgaatcgagcattaatttcgccgtccatatttggcctataggattggcaattccttttccgacaatatccggggcggagccgtgaacaggctcaaacatggaaggatatttgccgtttacattgatgttggctgcgagagcgattccgatgcttcccataatcgccgcgccgatatctgtcagcacatctccgaacagattcgaagcgacaatgacatcaaagcgttccggctgcgtgacaaagaaggccgccagtgcatcgatatgctgggaatccgtctcaatcccggcgtactcccggctgacctctttaaagatgtcatcccagaacggcatcgagtgaataataccgtttgatttcgtcgcgcttgtgacgtgtttccgccgacttgccgccagttcgaaagcataccgcatcactctttccgtaccccggcgggaaaagaccgcgttttgtatggcgatttcgtcctcaccctgatagattctgccgccgacagagctgtactcgccctcactgttttcgcggacgactatcagatcaaaatccttcgggttaacgaggggggaagtgattcccggcaggagctttgccggccgcacattaatcacctgttcaaattcccggcgtatcttgatgagcagcccccacagcgaaacatgatcggggacgagtttttgattccccaccgctcccaaaaacaaagcatcaaagtgctgtaacgtttctaatccatcatccggcatcatagtcccgtgctccaaataatactcgcagctccatggaaaagaagtgaaatcaaaggcaatgcctccatgtaattcggcgattgcgttcaacacccgttccgcttgcggaactgtttctttccctacaccgtcccccggtatgctggcaatcttgtatgttttcatgtttccgtcacctctgaatgaattgttttcggtttacggcagaccgtcgactgtcgttcatcataattccatattacgccacatccgatatgctgacaagctcgggaatgttgcttccatagataaactgttatatgatcttggtaacaataaggcctaaattgtatgaagaggtaggaaagatggataattttaaattagataagccaatcccgtattatctgcaattttattcccaattgaaaaaaatgatatttgacgggatttttaaaccgggtgaacggctgaatgagactcagctggccaaggatttcggagtcagccggtcgccggtcagagaagccatgcggctccttgaaaaggacgggcttttgacggcagacgatcgaaacggctttgtcatttattctttgtccgttaaggatgttgaagagatttataaaatcagaatgtcacttgaatcactggcggtcgaactggttattgatgaagcggctgagagtgaaattgacctcattgaaaaacagctgcgggaaacggaagaagccatcaataaaggcgtcaaagagactgagattatttccttaaacgagtcgtttcatcggctccttgtggatttcagccgcaacagccggctggccatgctgcttgagcatgtcaatgtgctgattcatttttgcagagttcttaattttaaaggcgatgaccgtgcggaggttatcctgcatgagcaccggaaagtctttgaagaaataaaaaagggcgacaaaacaaaagccgtgcaatatatgacggagcatctcaagcatgatgaagaacatctgaaaggcgtgctcaaagagggagaaacagacgaatcatcacgatagacaaggtgaaaagccttgtcttttttttgccgatgtcatcgaaccgtcataaagacctgacggatgttccttgcatgattttttccgcgtcatttatgatggatatggaagagacgcaaaaaaggtaaaggagtttgaaaaatggcgaaacatatactgatgatcaattttcccgcagaaggacacgtaaacccgactttgggtatgacaaaggccttcagcgaacggggcgatcacgttcattatatctcaacggaaaaatacaaaagcagactggaaggagtaggggcgaaagttcatcttcacagcgatctgctcagaatgacacccattgatcccggcagtccgtccggcatacttgcatttttaaaggttcatatcaaaacgtcactggagattttacatattgtgcagcggctggcagaggacattcaattcgacgccgtctattatgataaattcggtgcgggagagctggtgcgggattatctcaacattcccggcatctcttcttcagcatccttcctgttcaatgaagaccgtctgaaaatactgccgctccacccggaatcgggcgtgccgtttcagccggacagggaatgtgaagagctgttggccgagatgaaagacaaatacggtgtcgcccctgacagcatggttcaatttatgaacaacacaggtgaattgaacgtcgtctatacaagcagatattttcagcccgaaagtgagacattcggagatgattatttatttatcggcccgagttttccgaagagaaaagggcgcgtcgacttcccgattgactcattaaagaatgaaaaagtcatttatatctcaatgggaacggtgctcggggacacagaagcgtttttcaatctgtgcatagacgcgttctcagattttgaaggaaaagtagtcattgccgccggggaaaaagccgatctgtcgaaaatcaaacaggcgccggaaaactttatcatcgctccatacgtgccgcagcttgaagtgctggagcaggccgacgtgtttgtcacgcatggcggaatgaacagtgtaaatgaaggcattcattatcaagtgccgctggtggtcatcccgcacgataaagaccagccgatggttgcgcgccgcctgactgaattggatgcaggctatacagtgcaaaaagatgaagtaagcgctgaaaaggtaaggcttgccgcggaagaagtgctgcataacggaaaatacaaacaaggcattcaagccattaatgaaagctttaaagaatgtacggacatgaaggatgtccttgcccggatcgaccggtttattgaacaaaaacatgctcaataatacatggaaaaagcctgtttcctctgccaaagggaaacaggctttttataatggcttttagatgatgtgatgttcttcatttgcaagtttcacaagagtcagaagagattctgcctcacgtgcgtcgagtgtttttgccagacggtttttttcaaagatctgctggccgaagacattcactgacgcctggtcaaccgccgtgtgccagttcttttgtgaatgattctcagaaaaagagaaaacgaacacggcaaagaccgctataagcatcgccatgacccaaaatttttgccgatttcctgctgctgacataggccgcctcctaaacattttactggtattagatcatatatgagctgtttttaacagagtaaagaagtcattttttcatgtagtccaaatgaaacggagtacagccgaaagcccgccagtcaggccgatgagccaattcatattttgttcatattttattaaaagtttatccaagcctgtcctttacagtagatataaccacaaaatgctgctgaaaggagcctttaaaaaatgcatattcatatgatcaacaaaaaccagtttgagagtgacttggaggcggccggcttcagccctcaggcagatgatattatcggcaaaatgaaagagtacgtaacggaatacgcggcttcatccgaacggttcctgattgaaattcaaaccgtcatgaacgaatacaaagccgtcgtctgcgcgatgttttcgaccatggaaattgccggtgcaaataaagacgagaagcatgttgaatttgaagcctgcacagtattttgtgaataaaagacattcatcaaacctccgcggctgcctgaacggcagtataacgactggtgtttcgagaagggaaaatattgaaacttctaaagcggccgttcgtataaaagagtaaatcagcttgtatatggaggttcgtgaaatgaacgataagaaaaaacaagcgtttgaacagcttttcagcactttagacgaaagacatgaaataaacggcgctgtattggcagcggaaaacggccgcatcttataccagggttcattcggcgctgcagaactgaaaacaaagaggatgctgaatgaccaatcggtctttgaattggcctcagtatcgaagccgtttacagctttgggcgttatcattttagagcagcaagggaagctgcgttatgacgatatgatagagcggtggcttcctgattttccttatccgggcattaccattcggcatttactccatcatacgtcaggattgccggactatatggagttgttcttaacacattgggaccgggacagaattgccgttaatcaagatgtgatcaatatgcttaagcagcataagccggatgcttatttcccgcctggcaaggagtggctttacagtaatacggggtatgtggtgttagcggttattatagaaattgtatcaggcatgagttttgctgaatttatgaaacaagccgtatttcatccgcttcgtatgcacgatacgcgcatttataacagaaggctgagtaaagaaaacatcccgaactatgcatatggctatgtgtatgatgttcattccggagaatatgtgctgccggatgaacttgaggaaaccgattatgtcgtctttcttgacgggattcaaggtgacggaaccgttaactccgctataagagatttatatctgtttgatcaggctctttatacagaagaaatcatcagcaaagagtctaaagatcaagcgtttacaccgggctattggaatgaagaagagcaattcggatacggatttggctggatgattcaaaacagccggcaaaaagggaaggttatcagtcacgacggaggctggccgggctattcaactctgatgatccggtatattgaccagaataaaacattgatttatctaagcaatatggaacaatcgtatcaatttgaacaagccgtaattgccgcggctgtaaacatcttatttgatcagccatacgtgattccgaaacgtccggcagatcagaaaaaagcagatatcgatcctgcgaattacagcagatttaccggcaattactcatttcaggatgacacacatgcatcggtggcggtaaaagaaaaccgattgtatcttacaatagacgggcagacaccattcgaattattcccaatgacggaaacccgttattttgtcagggcgctgccgcttgaaattgaatttgcaggtgataaagcacacagagccccgcattttgttttatatcaggacggcacagaagaaacggctgtgcggatagattgagtgacatgcaaaacaaaaccgccgtcctgagaagacggcggtaatagaaaagtcaaacccctttgatgacgcgaaattttcttttcggctctgacataaatatagaagaaaaaatcatagctccgagcattgtgatgtattccatataaagcgaaacttctgccaaaaccaaccccgcaatcattaaaacagcgcccaataccaccgcaaaaaccttcgttttcatgatgagttccccctattatctgataattgaattatactgcatctccattaatgtgtacattttgtgaacaatttcacctgatgaaaggcaataaagagagatttgaagaattaggagaaatgacaggccatctttttgttttactgaagaaacgaaagggaaagtgaaaaatcaaaaaggcaaaggagttcttgaaatgaaagcgagactatttttattcagcatgtttctcctgatccccgttctggcgcttgccggatgcaacagccaatcttcaggaggaagcgaaaaagcgaaagacaaagaaacgcactctcacgaagacatgaatcactcaggttcatccgaggtgccgaaaggtttaaagaaggccgaaaatccgacttataaagtcggcagtgacgtcatgattttagcttctcatatgaaaggcatgaaaaatgcacaaggaaccgtaaaaggtgcttatgatacaacggtttacagtgtatcttacactccgaaaacgggaggaaagcgcgtcgaagatcataaatgggtcattcaggaagagctgaagggcgccggtgataaaacgttaaaaccgggtgacaaggccgtgatcgaggcatcccatatgaaaggcatgaagggcgccgaagccgttattgattcagccaaaaagacaaccgtgtatatggtcgactatacaccgactgacggcggccaaaaagtaaccaatcataaatgggtgacagaagacgagcttgctgccgcaaaataaaaagaccgcaaaagccgaaggaactcctttggcttttttgcggtctcacatttatgcggattttcttttcaaagcgggtctcgttaaagagaatacagctaacgcgacagcgataatgacaatcaaaccgccgcaccaggctgttgctgtgacagaaccggtttgtccgatcactccgccgccgatggctgacccgagcgcgatgccgatctgcaaagcggacgtgttgaagctttgctgaatatcggaagactcaggcgcaattttgattaaatagctttgctgcgccggcgcaaggctccagctgagcaatccccagatcaccatcgcaggcaggaaaatgattaaagaaaccgttgtcagcggaagaataaacaggatcagagcgaaagaaacggtcacaagcatgatgcttttaaatgcccctaaacggtcatacagccagcctccgaacgggccgccgcataccgctgacagaccgaacaaaaagtagcatacactgacccaaacggaactcaaatgaagcgttctttccaaaaaaggcgcaaagtaggcatagagtgtgtaatgccccgccaatgtaaacaaggtgacaagatgtgcgctggcaattttggcggacccgatcgtcttgatctgctcacgaaacggaatcattttttcagcaggtattttttcaaaaaagacgctgataatcagcatggaaatgagagataatacgccgattcccaagaacagaacgcgccatccgaaggcattgctgatgataatgccgacaggcacgcctaaagcgattgcggagctgaaccccatgaaaatgatgccgatcgcccgcgctctgtattcaggcgccacgattttaggagcaatcgttaaagaaaggacgacaatcagccctgtgctcatggaagcgagcacccgtgacaccataagtacggcgaaattgggactgaaataagcgaccagattacttaggaagaaaataaacagtgcgattaaataaagacgctttcgttcagcctttgccgtcactgccaaaagcagcgggccggataccgcgtaaccgagcgcaaacacgctgatcagctgccccgcgctgacgatggatatatctaagtcggaagcgatttgcggaagaataccgcccacaattaattcaaccaatccgactgcgatggtagatgctgcaagcagaaatactttgaaattcatgtacagatactcctttttttattttttagaaaataaaaaatcctgattacaaaa

SEQ ID NO: 30 - DNA, 39877 bp, Bacillus amyloliquefaciens
agggcaaacggcagaaacggccgtccggacgcggaaccgtctgagagcacgagaccgatagaagcctgaagggcggcgtccagcatgctcggatgcagggtgaacggctccttttcctcgcgggcggacggcggaagagtgagcttcgcgagcacttctccgcttccggcatagacggcgtcaagcgcctgatgcgacggtccgtaggtgatgccgaggctgtcgaacgcttcatagcactcagcctttgacaagtgactgccgccgcagcgcgcctgaaccgcttccacatcgagtacaggagcacgctccgtctcttcgagcacggcctttccctggaaaaagacaagcggctcttccccttcggcatacgcctcaaaagcgatgtctccgttttcttccggctgaagtcttacatgaagcgtcactccctcagaaagcgccgtcaccggccggagccaaacgatctgtttgagccggacacccgctttcccgcccggcaagtcttcagcggcaagtgtaacggcggcccgggccatttctaaagcagccgcgcccggaagcaccggttttccattgacgatatgatcggcaaaaaacggttcatgcccagaaaaaacagaagtaaagcgctgggcggtaaaggtcgatgtattcgtatggagcaacgggtgaagcttttcacgttcagctgaattccggctttcaagctctctctgaagacgatcggacgcccaatacgtctgcctggcaaacgggtagcccggcagattgccgattcgcggcaaaggtccgccataaagcaagtccccttcgatttcataaccttgacaataaaaatctgccagcacgcataacagctcctgatattttctatggtcagaatatgaggcgctgcacttgccgagcacttctattatgtgctcctgaatatgctgacggcctgcaaagtgctgcggtacttttcccgaaaacacataaggatgatgttcattaagctttgcctgcttccatacatacactgcgtcatcagcatcttgcactacgatggcggcgcgatggttaaagtgatgccgtccttttaacaacgtatagctgagctgggccagatcattttctttcagtccgccattttccgcccaagtgatcatatcttcgattttttcgtgaagagcctcctctgtttttgcagacaaagtaagtaaatatgcaggggcatcacgatgaggtgaagcgctgcgcttatagctttccataacgacatgggcgtttgttccgctcatcccgaatgcgctgactgcccccattcggtttttacccggcagagaaggccacggtttacccgttttattcacataaaaaggactcttctcccagttgatatagcggttttccccgctgcaatgcagactggcgggaatcatttcacgggagaacgcctgtaaaagactgatcaaactgacaatgcctgatgcggcaaacgtgtggccgatattggttttaattgatgtgagcgcgcaaaatgcttcttcgtttgtataggcagaaaatgcgtcataaagcgcgttaatttccaccggatcaccgagttttgtacctgtgccgtgtgtgacgatatattcgatatcttcaggattgatacggccccggtcataaacggaagtaagcagccgggtctgcgcgacgccgctcggagcggtaattccgtttgttttcccatcataattgatgccgctcgcccgaatcaccccgtaaatcggatcaccatccgcttccgcctctctcagcggcttcagaacaaccgccgcggccgcttcccccggaaccatgccgtcagcccttttatcaaacgcgaagcatttcccgttttccgacagcattccggctttatctatcgtttcaaaaaagtccggggtattcatgatattcaccccggccgcaacagctgtggtgcactctttattctgcaggcttaataccgcctgatggacagaaacgagtcccgaagaacatgctgtatttatcgccatcacaggacctgataaattcaagtgataagccagccgcgccgccaaaataccgttatgatgagacgtgacattgcctttgtcccgtgttaaaaggtgataatctccttcttccgcccctacaaacataccgatcgtctgctgcctgatgtgactggcgccgtagccggcgtcctcaagggccctccacgcttcctgaagaagcagccgctgtttcggatccatcgtttcagcttccctcggcgatatttcaaaaaataaagggtcgaattcgtccgcccccggtacagcgccgagtttccattttgaactcgtgaagcctttttttgcgaccggtgcgacaacgtccttttcctgaaacagaatgtcccacagctcgtccgctgtgcgcgcctgaggaaatcggccgctcatgccgataatggcaatggaatcagctgcctgactgccctcggttccggcgttcagcttatttcttcccctctgcttctttcgcttttccgttcctgccttttcaaagacagattgctctgcggattcaggtttcttttcttcatagacatgctccatgacggacttgtgttccgtcagaaaatagcggacgaccttctccagtgtggaatgtccgaaaaacagggccggtgtcacttcaattccgtaatgagcggacaaagaagaggcgaattccgccaaactgatagaatcaaacccgaaatcagccagattgtcagcgtccgtcagtctgttcttgtctattttcaaaagcctcgccgccaattctttcacatcccagcttacgcattcttccagtgtaaagcctttcatttcactccgccttcctgaaaacgggacgttcctgtttacagaacccgaaatcggccgttcgccttgatctatctgcaggaagcgtttggccctcgacggaaaaccggccaggacgagatactggctggacggctggactaacaatgtttcaaaagcgtcgagtccttcctctgtgtataaataacgctgtccgcttgattttaaatacatatcggtgctttccgccgtgccgacatgcatccccccttctttccaaagcggccaattgattgcaagtgacttgccgcttctgagtccgaggctcacaagtttttcccgatgacggacaaaagccatttggaagcggttccccatcgcgtagtcacaagaaccgaagtctcctaaaatcgctgaagaagaagagaaacaacagaagaagtcaagcggctcccgtgacagaacctgatctaacaccgcggtgccgtccgcttttggcgataagacttgctgaaaggtttgcagatctttctccagaatgctttcagtgccttgaagacctgcagcgtgaatgacaccgtgaatcggcccgcatcctttctctttcgcttcttgcaaacctttctccatctgagcctgatctgcggcatccgcctgcacgtaaaacaccttggcgcctgattcttccaatctctttatcttgttcagcaccgggccgcctgccgctgatctccccgtcaaaatgagcgtaaccggtcctttttcagcgaaatatccggcaaataacaagcctaatcccccgcatccgccggtaatcaagtacgttttcccgctttttatcacacgcttctcaacagaggcaatatccgtctgcttcatttccatgacgtgacggatttccccactgtacatgacactgcggaacgactcgctgtgaagttcttcacatacgttatggatcagtttttctaacggtcctttttgtccaaaataaaccgcggccgtatccgtctccggcaagatcagtttcagcgaccgttccagcccgatccatgactcggcgtaactgatatcggtatcggtcccgcactgagcggaaagaaggattcgcctcggtttaaaacgcaaagaagcagctgcgcggatcacataatacagaatggaatagtctttcacggccttttcatcttcaagcggccatccatacaaaatggcatccgctttgcctgcagccgtttcaatatgccgaaacgtttcttgatatgcttgtccgtcagtgattttaatttgataatgcgtgtttgaaagcttttgagtttcctcaccctgtgaaataaaaaacacgccggctcccggataaagggatcgtaaagactgataagcatgctttctggcagcttctcccgtaagaaaacagatgaccgttttcagctcttcatgaatggatttcttcaaaggctgccgagtccacatttcttcaaatatcatcatctcggattgttcctcttgcccgtgatcctgctgagacgggtgtctcattcttatccctttgatttctgcgcagacagtgccggtttcgtcacaaaattgaatgtcacagccggtttgattctttttattaatatacatccacatgccggatgagcacggacgcatgacgcgcagttcttcaaccgcttcaggcacgatatggactgacggctccgtttttgccaggacatgaaaagctgcgtcaacaaattccggcggcagatgatatcccggattacggccgctttcatctgtaagagcaagcttcgcccaaaccgcattttctcccgcataaagcttttcaacggtgcggaactccttactgatcgttacacctgatgtgcctggtgtttcataatcgaatgacagcgggcggcagtctttttgtaaggaggcaatatccagcacgcgggatggctgtatgttcccttgtccgatgattccataatgatgcagcttctcttcgtcactgtatatttcataataaatgccttcctcgtcttcagacagaagggagagattgacgcccgcaccgtgatgtccgccggtaatcgggtcagtccatgccgccgttcggatccatatctctttttcttcagagctgtctgccgcatgatgataagccgcaagcgccatttctaaataaacggctgccgacagaacccgctcccctctcacattctggaaaacgtgttcccggcctgtaaaagaagtatgatagctttgctccgccaaggttgacgtattttcatgcaggaaaggatgcacatattcagttgttcctgtttttggttcttcccgcttcatccagtagctttcttttgcaaatggataagacggcagactgatacgatgcggcagcacgcctttatataaagatagccaatcgacgggcgtcccgtgaacccaggcattcaaaagactgttaaattgacgtttttccgtccaatcactgactgtgccttccgtctccgtgacagcactatcaccccgtcctgtaaacaccccgcttacagaaccaacattattcagaaaagcagtcagcttctgttccaattcagaaacagagtccgctgccatcgccagccgttcttccatcgggaccctgccgacttgaagggtaaatgccgcgtcaagcaggttcgcatctgtaattgttccgtttccggcggtatccgccagcaacagagcccgctcgcgcaagcggtctttatcttttgccgataaaacaaaaagcgccggacggccggtgtctgccgaactcatttcagccggttcatactcttctatcagcaggtgggcatttgcaccgcccgctccgaaagaagatgtacccgcgattctcggatattcccgtgttactccttcagattctatgaccggccgtctccattccgccgttttctgctgcacgataaaaggagaagtttcaaaatcaatttccgggttcagctgctttgaatgcagcgacggcaccagatatccgtgtttcatctgaagaagaattttggtgaccgcagcaatgcccgccgcactttccaggtgtccgatattggatttaacagaaccgatggaacaaaattgctttgcatccgtatagcgtcggaaagccttggttaaccctgcgatttcaatcggatctcccaaggaagtgccggtgccgtgggcttccagatagctgattgctctcggatcaatccctgcccgctccatcgcctctgcgatcacttccccttgtgcattcggattcggaacggtgaacccgttcgttttgccgccggcgttcagagcgctccctttaatgacaccgtatatatgatcatgatcttcaacagccttattcaacggctttaacacgatacagccgacgccctctccgtcaacaaacccgtcagccttatcaccgaacgctttgcacgcgtttgacggtgacagcattctcatagaagaaagcccgatataatgaaccggatctgtaatcaggtttacgccgccggcaatcgcgcattcagatgcacctgttctgatgctttctgcggcgagatgaatggcggttaaggatgaggagcatgcggtatcgaccgcgatgctcggaccgtgaaaatcaaacacataggatacgcggttcgggataaagtggtagtgggcccctgtcggatagttgccgttcatgacacccgcaaagacaccaacctttttaccggcgcatagtgaatcaggggtatatccggcatcctcaagggccgcataagcggtttccagaaacagtctctcctgcgggtccatgcgctccgcttctttcggggagattttaaaaaacagcggatcaaatttatcaatatctgataaaaagccgccccacttcgtatacatccggccttccttaccttttgtctcatcatagtagtcccgccaatcccagcggtctttcggaatttcggtgattccgtgttcaccggtctttaaccgttcccagaactcattaacattttcagctccgggataccgtccggcaagaccgacaattgccacttcaaggtgttttgacggcggttcggaagcgggcggtgctttttcagacaaagatgccgcttggcgcttcgtcaatccggcgctttttttgcggctttgctttttctgtaatgtgtgcggcgccttttcggcttctttatttgtcttgaaaatcccggccatatcatcctgtcttgagctgacgagatattccgctaatccgccgattgtcggatactcgaagaacaaagtgctgctgagatcaggtatgtcttcccgcacgcggttggtcagctgtacgattaagatggaatcgattccgtattcttcaaggggcgtatgggcttgaacgtcctcaatcggcatctttaagatggcgctgacgatctgtttcaggtagtctgtgcttttttcaagcaaagagccggatgatgccgcttcagtatgacggacttcttcagaaaatcgcgcatgcagttcgcgctccttcgtttcagccaagtatgcggcaagctcttctatcgtccggtattcaaaaaacagcgtgctgctgatatcagggacaagatcccgcagctcattcgtcagctgaacgatcagaatagagtcaatgccgtattcatccagaggagccagcggatttatctcttctgccggcatttttaatacttttgccgcagcccttatcagaaaagccgctgtcttttccgaaagcccctctcccgcttgtttgatggggagctgacgatcagaggatgtttgcggtacgtttgattggcgcttttgcgcggtgtaagctttcctgctctgcctgatgactccgttgcttttcgccgtgataatctgctgggtgtgcagacgttcgttttcagccggaaattgaatggaatgaaagccttcagccattaaaacggatttccatgtttccggataaagaccggggcaccccggaatccacagcgcctcgtcttcgtacagccaccagccctctaataagccgaatgtaacatgtgtaaacggcgtatgcccgcccagttcattaacgagcagcaaaccgtcctttttcaatacggcttttgccgtccgtaaggttttccggatgtttttggtggcatgcagcacgtttgcggcaatagcgatatcgtaggttctcagatgtaatccctggcccgccgcaggctgctccacattaaacagctgatacgtcaaatacggattgtccgcgccgtattccttttcggcatgcattaaaaaagcttttgacaagtcggtataacagtattcctgaatatggttttgataggggcggagctttttaaacagtgtgctgctcgttccgccggtgcccgctccgatctccagcagacggatgtttgcctcaggattgtttttaattacattttccacataaatacacgcttcatttgccagcacatcgttgtaataatcagcgagaatgttatgcttatagattccttcaacaagctccattgaggaatcgggaaacatcacgtcagtggcttttattttgcctgttaaaatgtcaggcaaagcttgaatgacggtatccgccagcagagcctgcgctttcatatccggatctttcagccattcgtttttcttcttatgccactcttcccaaaccgcggccgtttcatcgcttttaaaatcgctgtctaaaagacggatgctttcttccagccagcgctcatataaaggcagacaggaagccgccggcgcttcgccggtcagacccattgaacgcagcgtcacccgcagcacttgcagcaaaagccgattcaattctttcatttgattgcttatttctgttcttaaggataactgtgtacggtctttttgtttgtctcccttacccaaaaccttatcctcctaagaaaattaaatttgctccgtcattttgacaggcaatcagatagtcacaaattcatgagggttcattccctcgatcggaatcggcttggtcagcttcatcagccccatacgggagatcggctgcgtcagcagagtttccagcgcctgcatcccttccgcacggctgatcagcccgagaccgattgcactcagtctgtcaaactcttcagaaatgtgattgtcagcccgctcccaataaccccagttcatcactttgacccggcatgacagccgtccggaaagctcatgggcaaatgcgtctttaaatgcgcaccccgccgcataatgactttggttcggattcttaatatatgaaataaccgaagagaaaaagagaataaagtccaaagactctttcgcaaatacttcggcaatgttgacggaaatatccactttcgccgcaaggccggcgtgaaactgtgattcttccatatcttttacgctttcattcgcaaataccatcgctgaatgaacgacgccgctgatggtgccgtatgtgtttttaatctgttcataggcgcgctgaagcgatggaagatcagaagcatctgcggctatatattcgggagccgggcctgatgaccggtaccggtctattttttggtgtatccggctgtccagcggcctcctcccgatccagacgactcgggctttatacgtcgtcaccatataatctgtccaaacctcgccgatgcctcccgcaccgccgatgatgacatatacgcctccatagcggtaaggaacactttcagacggcccgctttggaccggaagcaattgaggccggtaccattcctgatgtctgcgcacccacgctttacccgtacggtcgcggggcaggctgaatatgtcttctgcggggaaatcccccccgtcttcaagatcggccagacggatgtgccagctcggatgttctttagcgagagacccgacgaaaccgtgcacactggaatgagcgggacgcacctcatcatattgggtgataggctgtgcttggtgcgtaatcaccgtcatccctagctgctcttttccatacccgagaccgataagagctttggccgctctgaaaatttgcagcaccccgcttttttgatcatggctgtcagaatcagccggctgaggggcaaaccagatcatatgctgaatctcaccgagacggcggagccgatcagatatcacttcaacggaagcactttggccgatatcaaatcgcacagctttaggaaacaatcgtaaaaccgcgtccgcctgcccgtctgtaccgcctatgatgacagcttttgcttcagaaatgtggaagccggtttggttgtctatcggttccgcgtcccatacctgcattagtttgacggctccggtaaggttacccgtcagatcgtattgcttattatcggttacggccggcgcactttcggccatccgggcagaaaatccttttatccttacacacacattgccgcgttcatcacatatatcaatgtccattcttcgtacggccggtgtttcatgcgtcacaaatacggccgcccacatgtttggaccgcacgtataaaaaacggtcagttcatgcaattcaaaaggcattaacggctgctcaggataacccgcttgatcttcattcataacgccgatggccgcctgaaaagcagaatcaatcagactcggatggagcacaaactgttcagcctcatcagaaacggaagcagggagcaccaatttagccaaggcttctttctccccgcaataaatgtgatcaattccttgatgtgaaggtccgtatacaatttccgcctttgcaaacgccgcatagcagtcttcttttgacagcacttttttgcggcatcgcgctttcagctgttcaatatgcaaaaccggcgcctcagacagcggctcaatcacagcactgccttcacaataaatgtctggatcattttcattgctgtacactcgaaatgaaacattgccgttatcctccaaagaaagccctgtcgtcatacgcagcggctcttttttatgaacggcctggcgtatccagctgatataccgcagcgaaatgccggttttagccgtgtattcagcggctaacggcgcggcagccagttcagccgcggctctcgccatttcaagataagccgccccggggagaacacacttgtttcggacgatatgatcggctaagaagaattcatctccgttcagtatcgtactgaatttttgttctagcaaatctgatgtattgcggtgaagcagcgggtgaagcctgctttctgtatttacggaagtgacgggatgatcgggctccggtatccaatatcgttcctttgcaaacggatacgtcggcagactcatcctgcgcggtttctcctcctgatacagccgcgtccagtctatgtcaaatccttttgaccacagctccgcaagttttttgtaagtgccgctgtccatccattttcggatcagctcctccgtatcctgatcatcattcaggaaacccctgatttccgttccgctatcagaccgcccttgaaagcagccgtcaatctgccgtttttgttctgtaaattcagttaatttcctgatcaggtccgcttgatcgttcactaaaaaaacaagccgttcttccattgccagccgtcccgtttgcagcgtatacgccagtgaccgcagggaaaaaggttcatcaggctgcttatctaagccggactgaccgaaaagaccggaaagaatattcttatatttctcatcgtttgtcagacattctgctaaagtccggacggaagtatgctgtatgagatcagtcatgtctattgccagcccgtattgatccgtcatcagctcagcaaactgtgtcagctgcatgacatccaagccgaattccttccaatcctgttcaccatctaccgagccggactctacatgcagaacttccgccagaacactgcgcagcgcattttccagctgattttgcattgtatctattttgtcatgaagcggcccgcttccttcaggcgcttcatctttgagaaacatcagcaggcgggcagcgtattctttcagccgctccggatttttcgctgacagaggcacgatatacggtctctcttgattctccgtaatgccggggcttttgggcctgtactcttctaaaatgagatgaacgtttgaccccgtcgccccgaatgaactgatgcctgcgcgtctcggacaggcatgttcaatgccgttctctgtatacgccggctttttccatgactcggttttttgctgcacgtaaaatggcgagtcctctaaacggagatacggattcatcgtctttgagtgcaaagaagggacaagcgttttgtgaaacagctgcaaaaccgttttatgaagcccgctgatcccggcggctgattccgcatgtccgatattcgatttaacggaaccgatcgcacaaaattgccgatcctccgtaaacgtgcggtaagctttaacaagaccttgtatttcaatcggatctcctaaagaagttccggttccgtgcgcttccacataagaaatcgtccggggatcgatccccgtcttttcaagacattcagctatcatatccccctgcgccacggggctcggcacggtaatcccgctgacggtccccacgtgattgacggcgctgccttttatcaccgcataaatatgatctttatcttcttcggccttgtgaagcggcttcagcagcacggcaccgatgccgtcagctgagacatagcctgtgcctccttcgccgaacgtgcggcacagcccgtcactcgaatgcatatccatcaagccgtatgtgatatattttgtcgggtgcaatgataaattgacgcctccggcaagagctgcttcacattcaccgcgtctcagactttccgccgccatatggacggccgtcagagatgacgaacacaccgtgtcaaccgccatgctcggcccgtgaaaattgcaaaaatatgaaacccggtttgcgatcggcgcatagttcaagggataaggaaagaccagccctttggccgcagcttcagcgccggcgagagaataatccatatgcatcaccccggcaaacacaccgacgttcattctcttattcggccctatcggctgaacgattgtttccggggtgtagcccgcatcctcaatcgtttcccagcatgtttctaaaaacaatcgttcttgcggatctttagcttctgcctcccgcggagaaatccggaaaaatttcgcgtcaaaacaatccggatcgtctataaaaccgccccatttggaaatcggcttgccggacggcgatcgcaaatgctcatatgtcctcgtatcccagcgggaacgaggcacttccgttacgctgttttctccattttttaaatttgtccaaaattcacgaagatttttggcgccggggtaccgtcccgccatcccgacaatcgcaatatctccattctgcgttccggctgacgccgattttttcacgaggttttgggtcgtcctctttttttcccggtgcaaaggctcagcacttgaatgcccgctttgagcatggccgaaaccggctccgtaatgttcgcacaaatatcccgccaattccgcgattgtcgtgtattcaaataacagtgtcggcagaagctgcgttccgattttttgttcaatttcctttaccatgtccaacagccccggagaatccaggcccatttcatagtagccgatatccgggtcaatctctttcacaggtttgttcaatcgggcggcaagcaattcttttaaataaaggatgcactgttcaataaggccggcggaagcctccgcatggcggggctcagaaggcgccggttccgcttgcggagccgggacggcattccgcccgtcaggttctttcttttgccgtttctgattgatcagttccgggtccctcaccagtttattggcgaagtttttcagttcgccgacttttctgccttcctcattgaaaaactccattgtcacgtaaacgagatctttcttacgggtgacggattctttttttatcttagtgatacatgttgtctgcagcaattcggcgcaataaaacgattcataaaacagcggcagaaataattgcccctcctccctcgtcaaaggagcgagatatacattggagccgatgctgctcgcatctatcaatgcgggatgaaacatcgcctcttctgcatgttccagctgatccttttgcaccgacagatcaatataaatctctttttcagtttggtagacgcttccgcagcctttcatcattcctgaatgaaccagttcttgatccctgcattccgcgtaaatgtcctcaagcggtatttctgccgccgtttgttttacggcatccatccggacgctctcttggaagccggcgggcttgacggaatgcatttgcgccgcggcatatacctttgtctctgctgcttcgtcaccttgtttttgccctttcacctccaccttccactgcccttcgccgttctctgtacaatcaacggaaagcaggattgattctccctgttcaggagctaaagggtgaaaaatcgataagtgcctgagttcaaggccggcataaaaaaaaccgttttctctgaaagtctgatagatcaggtcaatataagccagacccggcagcagttcctttccataggctttatgatgtttcagaacgggatgctgattgttaataagaagctgctcttgcatatgaacttcctccatatcgacgttcaattttcagcgcaatcagtaagtcttcatttgtttccaaaacgtattcggacgggatttatgtgcgttttcatgcaggctttcggctttgtccggacgaatgggccggcgctttaattcctgtctcggcaaaggctttctgaccggggtatacgcctcttgctcccaggcttccactatgacatgggcattcgtccctccgtcagcgaaactgctgacggcggcaatccgcggtgaatccgtccattcacgcagagcgtgcgaaaaataaaacggcgaggcggacaaatcgtaatgtgtcatcggctctttgccggaaaggaaaggcacacgcattcggcgcgagagcataagcactgttttaatgaatccggcaatcccttcagcgcataacgggtgtccgatattcggcttcatcgaccccaattcgcaaggcgagctgttttgcatacggtacaccgcttcaatcgccctcagttccaaaagatccgttacttcagagcctgaaccgtttgcttcaatgtagctgatatcctccgcttttctgccgcttttggcaagcgcattggccatcacttctttctgcgcctgtatattcggtgtggcaggccccgcggttctgccgtcattgtttacggaaatgcctttaatgaccgcatgaatccggtccccgtcttttacagcctgggccgctgtttttaaatacaccattccgacgccttctcccaatacgatgccgcccgtgcggcggtcaaaaatatgaaacgcaggctcttcgcttaacagattgcgaagttcgaacatccggtgggtttgaccggattccagcagactgactcccccgaccaccgctgagtcgatttcaccgcaagaaagcgcctgtatcgccatattcataccgacaagcgctgaagaacaggccgtatccaaaacgagactcggccccttcaaatcaaagaactgagaaagattggccgctaagtaattcgggcccgcggcgactatcggattttttgcatgtttcagatggtttgcgtcaggcatactgccgccgcgtcctcctaaatagacaccggctgacctgcctttcatttcttgtaaagagtaaccgctgtctctgaacagatgaagcgcctcttctaatataagaaaggactggatatccattgccctgatgtcttcttcgggaataaggaaaaactccgggtcaaaatgcgttacattttttaaaaggcccgcataatccgccttctccgttttccagcgttctttcggcaccctttgaatggccgacgttccttcagacagcagcttccaataagcttcaattgattcagctcccggaaaacggcaggacattccgacaacagcgatgtcttgagccgctctagcgccagaaggctgaaagacagcggctgcagtttgtttaggaacgtccgggattttaggctgaaccggttttgaaacggcagctttgatttccggatatgctgtttcaagccatccggccagcgcagcaaccgtagggtattcatacagcaccgccgggtcaaggtcagctttgatcctctttccgatcgctctggacacttgggcaagcatgatggaatcggctccgtaatcttgaaacggtgtatcagattcgaatcttgacggctccagtcttaattcccggcagcaaatgcccgtcagccactcctcaacgctttctgtatcggcctgttcctgctgctttgtttcagtaaggccggatgaaagcagcagacggtcaggctcccatttttccgggtgaatgacggccggcataataacagatccgcaatcgcctgccatgatggcatcaaacaggctcagcccttctctgtcagtgatgctctttaaaccgcttttcagataggcccggctttttgattcgcccatacccgtttctttccagctcggccattgaatgctcagcaccgggaaaccttttgcggccgcaaaataatccatataggcgttagccatggcataatcgctttgtcccgctcctaattccggcatcacgccggacactgaagaaaacagcgcaaaaaaccggagaggctccttgtgcagcgcttgatacaacaggtccagtccgtctgttttaggctcaaccacgggcatcatctgttctcttgttttacggataaaggccggatgatcgagatctacggctcccgctgcgtgtatcacgcctcctatcggccccatttgatctttcacccggctgacggcctgctcatattcagggccggaagatacagacagcacttccgttcggacacctttttgttcgaactctctgattcttctcactttttcagaaaacggggaattccgtttgatatgatcatcccactccgctttcggcggcatggtttcttttcctgtaagcacgagtttcgtgactccgtatcgttcggcaaaatgccgggcgaataaatatccgagtccccgggtccctccggtgatccagagcacatggtctttcggaaatgaaaattctttttctgctaagctgtttgtttcttttaaccgcgcgtgatagcgcacaccgtttctgtaacacacttcgatgtcttcagaatcgcgaaaaaactcctctgcgatctggtttgccagctcaggatcttcggcagtccgttctgcatccatatgccgcgagcggatatccttatactcactttggagcatccggtacaatccggccttttttgcacctgagaaatttatcgtttcatttgcaaaaagttcaagcccctttgtcacacaaagcagctgaagctttcggccgcggtttctgttgtcaatgagagactgcagatgatgaatccagccgtcatcatgattgatttccgttccgcatccggtcacatcaatcagaccgccaaaccgggacgcgtccccagatatttccgatgacgcagcgtcaatgatttcagactcggggaaataacggcacagctcaacggccaaatttcctgtctggtgatcggcggctattccgatgacgccccgcacttccttaaccgaaacactgctgctttctgcccagcttttctgtaaaaagcgggtttcacgcaatgtttcagaatgtgtttcagcatcacgaacattgtccggcgctgcatcgaccggccaataccggtcctttataaatggataaccgggaaggctgatgcggtgcggcaggctgccattataaagctctgaccaatcaatcttcagcccttttacccaaagttccagaagcttcgcgaatttttttcgtttcatccatttacggacggcgtcctgcatatcttcatccttaaaaacggctagaatgtctttatactgtttgctttttccgagaaaacagccgtctgtcccgccatcaataaaacgctgcagtttttccgctaactgctctgtcgacgtcacgataaacgccgcacgttcttccatcgcttctcttccggtttgaagggtgtaagccgcatcccggagactgcggtctgtgacgtctttttttctgatcgcttgaagaagctgctgcgcccgctgcttcaggctggcctcctgtttggcggataataaaatgactgcgggatcttcatctgtgaatggctcagaaatctctctatcaggttcaatatattcttctatcaatatgtgggcatttgccccgcccgcaccaaaagaagagatgcccgcgattctcggaatctctttctgcgctccgttttcctcaatgaccggccgtttccagtctgccaattcacgctgcaccaaaaacggcgtccggtcgaatacaatattcggattcaatttccggcaatgtaaagagggggccagcttgcgtttttgaaactggagcagcagtttcgttacaccggcaatgcctgccgcggcttccaaatgcccgatattggatttaactgagctgatggcgcaaaaacctttatctgacgttttcgtttgaaatgcgcgggtcaaaccgtcaatctcgatcggatctccgagttcagtgcccgtgccgtgggcttcgatacagctgatcatccgcggatgtattcctgatttttcaagcgcgccggaaatcacgtcagcctgggcgctcggactcggcactgtatacccgtttgttctgcctccgtgattgatatgagtgccgcgaatcacaccgtaaatatggtccttatcagccatcgcttttgacagcggctttaacagcacggccccgacgccttccccgggaacaaatccgtccccgccttcaccgaaacttttgcacgttccgtcttttgaaagcattcgataggcgctgagctccgcataagccgaagaatgcgtatacacattcacaccgccggcaatcgccatgtcgcattcgccgcgaaggatgttttcacacgcttcatggattgcagtcagcgaagacgagcacatcgtgtcgaccggcatgctcggccctttcagattaagaaaataggaaactctgttggccgctgaactgaacgacgttttcggctgcagggtcccgccgtttttccagtacattccgtacccgtttttcgtaatgcccgcaaaaacgccgacccggccgttatacagattctcaagctgttccttcgtataaccggcatcctccagcacctgccagcacatttcaataaagagacgctcctgcgggtccatattcaaagcatcacggggtgaaatttgaaaaaacagcggatcaaagaaagcggcatctttcagaaacccgccccgcttactgtaacttttcccttctttcacggcctcttcgggatcagggttgtagtacttgtccttttcccagcgctcttcgggaatttccgtcacacagtcttttccggctgctaagttatcccagtacgcttcaagtgtttcagcttgcggataacgtccgctgactccgataatcgcaatcccttcttttgtctggttctcattggaaaaagaaggccgtttctttcgcttgataaacgacggaagcaccggaaaatcttcatttgccaaaacctgttctgatatgcctgaacggtgctcatcatcatttgtccactttcggcattcttttggataatccgtgacaaagtgagcagccagggagcccagtgtcttatattcgtaaaaaaccgttttggaaaggtcaccgaaaagcagagacaattcgcggttcaatttcgtcacagtgactgagtcgattccgtaagtttccagcggctcttcagtatctatgttggaaacagcaatttttgtagtcagggcaaaaagcgttttgagctgaagaagcgtttgttcatacaaacgttcactgcggtgttcggcattggtttttccgggagcgcccgtcttgatgacaggctgcagcttcaaccccgacagggaagcccatatttttccttcttcgtcacataaatcaatataaaagctccccgccttctcttgtatctcggcccataccttgtcaggacaaggttcataaaacaaaagctcgtccaatgaaaccggggcgagcgttttatattctttgccgccaagcaacgcgcatgcctctgtcacactttgcatcacacagggagggaagccgaatcgggcggattctttttggtctgtcaatggaattgatatgtctgccagcatccgccctgctgaggcgtaaatacgctcaattcctttcatgtgctcactgtattgaacggtatcgttctgagtgatggcttcaatttgctgctgatccatcagggaaccgctgttttccttcaagcggctgatatccagcatgccaggcgcagcatcaactggctgaatcgtcccttggctgtacacatcataatgacttaaatcggcagaaaatggattataaacctcaaaccttttggcttcaccctctgcgggtatcagcctgatttcgatatggaacggctcagcctcagtcagaatgggctttgaccacacgatatgcgtcagccggacagcctcagtctcctttactgtcaaagcagccgcagctctcgccatttccaaaagaagttctccgggcataagctttttacgctgtaaagaaacatcagcgagaaaaaattcccggccgctgaaagctgccgagaatcccagtcccgtttcatcggaaatatgctgctgagcaagcggatgaagggaatccgcttggcgaagtcccatccgcatatcataatcgcgcaaaatgccgatcgcatcctgttttgtcatttttttatttttgacgtcagaaaaaacccggtgcagaaactctttcatatggtttcctccattacgctaatccctgtaaaaaccgatcgttctttttacagcggcttctatgcttatttcgtttctctccaattcatcaagcaggtgttcataagtcttaagcggggacatatcagtctcataagtctcccggtgccttatatgctgcgcactgtgcggtatccagcaatgtgttttcgtaaaaggatagacgggcaggctgactttttttggcctttcgtccggatataatttattccagtcgacatgcaagccttgcacccataattttgcaagcattgcatactttcctgcttcaatccattgatctatggtcccgctcatttctgcattgtccgtcatctctgtaaacagctgtttcatcgctttgttccggcctgtaaagaaattctgccccgcctccttgccgctgaggaaatcattcagcgcgttcgtaagctcttcttttgtttcagcaatgacggcaaggcgctcttccatttcatcccggccaagctgaagcgtataagcgatatccgcaagagctccgtcagctgaatgtgtcttttccaaatatctgcgcagctgttccgcacgttccttcagctgttccgccgtctttgccgagagaatgaataaggacggctgaagttcaccggcagtccattgtttctcttcaacaggagaaacatattcttcgagcacgacatgagcgttgacaccgccaaatccgaacgagctgacacccgctctccgcggcagttcatttccgctatcatcagtcgccgctttccacggctgagtgtcgcggacgaaataaaacgggctgccgtcgaggctgatatacggattaacggtttcacaatgcagacttttaacaagcgttttgtgctgcatctgcaaaataatttttaaaagcccggccatgccggcggcaagctctgtgtggccgatattcgttttgacggaaccgaggccgcaatgaggctgatcgggtgccgttactccggctttctgataaagcgctgcaaaagccgctttgagtccgttgatttctatcggatctccgagcgccgttcccgtgccgtgggcttcaatataactcactgtacgggggtcgatgttcgcttgctgatacgcttttatcatgacttctgtctgtgctttcggattcggcgatgtaagggaagccgcccgtccgccatgattttccgccgttccgcgaataacggcataaatacggtcgccgtcacgttccgcatcggataatgttttcaaaacaatcataccggcaccttcagctctgacatacccgtccgcttgatcggaaaatgttttgcagcgcccgtcttcactgagcattcccgctttattaaagctgatatgcatatccggcgacacaatagcattgacgcctcctgcaatcgcgatgccgcagtctccggcctgaattgccctgaccgcacggtgaacagcgaccaatgagcttgaacaggcggtttcaatcggttcgctcggcccatgtatattcagaaaatagctcatgcggttcggaccgattgacggaaccgttccggcggcggaagaaccctcaatctctatatggaactttgaagcttcctgagcgtaaccgctgtttgtcgtgcctgcaaaaatgcctgtatttgtacctgacaggcttttggcagagcagccggcatcttcaatcgctttccatacatgcatcattaaaagtctttgctgaggatccatcatttcggcttcatgcggagaaataccgaaaaataacggatcaaattgagcggtttcatcaatgaagccgccccactttacattgctcgcatttttatctttctgcggatctccgtaatactgtctccagtcccagcgctccggcggtatttcagaaatgcagtccttttctccggctaaattctcccaaaacatttccggattttcagccattggaaatgcacagctgattccgattatcgccacgggctcaggtgcagctgcggtttttgttttaggaaggcgggactgaatcgagaatggctccgtcttcatttttttacgcacaaccggtttctccgtttctgtttctgcctgtgagccgaatgtatccggatgttccgtcagcaagtattgggcaaaactaaagactgtcgggtattcaaaaaacacggccggtgtcagttcaagcccatacgttttatttagttcatttgcaaactgcgtgaatgaaaccgaatcaaagccataatctctcatctctgattcagcatctatctcgtcttctttcaccttcagaatgcctgatatcatatgtttgagttccgcttgtactttattcggcatatggacgggcgtcttccttgacacatgaatgctacgggacggttccggcgtttcaggcatcaggttttttcgaatccgtttttcgtcgccctctgccaccatgacctggtgttctccggaggcaaaagcggcgtaaagcgcctggatgcctgaggctgatcgcatggctttcattccggtctgttcatacatcagccgttcggtctctttgtccacacgcataccgccctcttcccaaagcggccagttgacagacagggtctgcccgctccgctcgttgtcccgcacgagacggttccggcgggctgcataaacatccataaatgcgttggctgccgcataaccggactgccccggatttcccatgcctcccgccaaggaagaaaacagaatgaaaaagtccagccgcacatctttcgctgcttcatcaagattgataagccctttcactttcggcgccatgacggccttccgttcgttttctgtctggttcagaatgtagttgtcagcgatcacgcctgcgccgtgaatgatcccgtcgagtgttccgtgctcctcctgtatgccgcggacgagggcgatgaccgccgctctgtctgtcacgtcaaccggttgataaaatacgcgggcgcccgacgcttccaagtgccgtaagcgggcggagcgctcttcatcaagcacttctgccctccccgttaatacgaggacggcatttttgacgcgggaggctatttcttcagcgaaaatcagtccgatgccgcccgctcccccggtgaggaggtagaccccttcgtctttccacggaacggcgccgctttgagaggccggcagatgacgccagtttctgacgagacgtttgccgtcttcataacggatttccgcttgttcaggatgcgcccggttttctttcagcttggcaagaagcgatgatgctgactcgtccggatcggcttggatgacttggccgtacagcttcggatgttcaaggtgagccgttttcaggaaagcggccagccccgccaatacattgtcttcccccctgtcggggacaagaagctggatcagcgttttttccttctgtttttctttgataagacgcgtgacgatcgctgacagctccgccgcgcaggcgtcataacggtcttcaatcggaccttcgccgtcagccgcacatacggcgccgcttatgtcctcagcattcattccgccatacagcgtcacgtatctgaaagactcttcttgtccgccgccttcacccggcggtgattcctgccactttggctgaagcaagagcggtttttcctccgtttcctcttccagaaaacgggcggtgagccccgtcaatcggacacataccgcaccgttttcgtcacacagctcaatatgataggcgccgtcctttgaggaaagcaccgcccacatcgtctcccggcacgcagaaaacacctgcatatcctgcagggcaaacggcagaaacggccgtccggacgcggaaccgtctgaaagcacgagaccgatagaagcctgaagagcggcgtccagcatgcttggatgcaggatgaacggctccttttcctcgcgggcggacggcgggagaatgagctttgcgagcacttctccgcttccggcatagacggcgtcaagcgcctgatgagacggtccgtaggtgatgccgaggctgtcgaacgcttcatagcactcagcctttgacaagtgacggccgccgcagcgcgcctgaaccgcttccacatcgagaacaggagcacgctccgtctcttcgagcacggcctttccctggaaaaagacaagcggctcttctccttcggcatacgcttcaaaagcgatgtctccgttttcttccggctgaagtcttacatgaagcgtcactccttcagaaagcgccgtcaccggccggagccaaacgatctgtttgatccggacacccgttttcccgcccggcaggtcttcagcggcaagtgtaacggcggcccgggccatttctaaagcagctgcgcccggaagcaccagttttccattgacgatatgatcggcaaaaaacggttcatgcccagaaaaaacagaagtaaagcgctgggcggtaaaagtcgatgtattcgcgtgaagcagcgggtgaagtctggctgctttctcactttccgctgagcctgttttgtcaagtgacacatcagcttttgtcacccaatatcggtctttggcaaaagggtaggccgggagactgatgtggcccgggttgcgctgataaagagctgaccaatcgacgtcaagtcctttaacccaaaggtcaagcagctttccgtatttcccttttttcagccaggcatttatggtaagcgccatatcttcatcagaagtgagcgaagccgccaatgaatgatgtttggctgtcctgccccgccagatatgagcatgttcgatattatgatcgtttgagaaactcataagcttcattttcagttcttctatcgactcggccgtaaatgcaagccgctcagccatcggttctcttcccgcctgaagcgtgtaagcgatcttggccaaatccccgtcagaacgtttttttcttatgacatcatccagaagctggcgggcgcgctctgtcaattgctgctcatttcgcgctgataaaatgataacagccggtttttgcggagaaacgagcacgttttccattggtttcaggctctcagacggcacatattcctgaatgatgacatgtgcgtttgaacctcctgctccaaacgaggaaatgccggcaattctcggatattccttcatttcacccgtgatattcaagacaggtcgtttccattccgtttctgtttgctgtacgaaaaacggagtgtgctcaaactcaatattcggattcaattccgccgcatgcaatgaaggggcaatcctcttatgtttcaattgcagaagcagtttggtgattcccgcaatcccggcagcgctttctaaatgtccgatatttgatttaatggaaccgatggaacaaaactgcctgtcttctgttgtcaggcgaaaagctttcgttaacccgtcgatttcaatcggatcaccgagcgcagtgcccgttccgtgagcttccaagtaactgaccgttctcgggtgaatgtctgttcgtttcaacgtctctgcgatcagatcaaactgcgctttcggattcggcaccatataagcgtttgtcctgcctgctgcgttcagcatgcttcctttaataacgccgtaaatatgatcgccgtctttctccgcttgagcaagcggctttaacacaatcgcccctactccttcaccgtcaacaaaaccgtccgcactgtctccgaaagatttgcatttatcaccgggagacagcattgaaaaagcggacagccgctcatagtgggccggatcaacgataagattgactccgccggcaatcgctgtttcactcattccgctccgcaggctttctgcggcgagatggacagctgttaaagaagaagagcatgctgtatccacagccatactcggcccttggaaattgaacaaaaacgatactctgtttgcgatagaccagtcgctgggaactgtcgggtaattgctgttcatcacaccgacaaagactccgattttccggctgtcacaaagcgtagccggggtgtaccccgcatcttcaatgcttgaataagcagtctgcagaaacaacctttcctgcggatccatcctttcagcttccgcgggagatatacggaaaaacagcggatcaaatttatcaatgtcatcgagaaaaccgccccattttgaataaatggacccccattttccgcgttcctcgttataaaacgttttccagtcccagcgatctttcggcacttcagtaatagaatgcctgccggcttttacattttcccacagctcatcaacgtgatcggcgcccggataccggcctgacagaccgatgacagcgatatcctggatatagggatctccgttcgtcctgctgtcttcctcgttttgaggaattttgttttgttttacattcaggttatctgtgtgatcagacagctgctcctcacgcacacccatcgctttcataaatgctccccgctgagaaagaagcaggtaatccgcaatttcttctatcgtctgatattcaaaaaagagggtgctggtcatttggtcaaacacgttacgaaaagcattcgtgagcctgacgaccagaatagaatccaaaccgtatgcggttaaggaaaccgacggatccattctcccgctcggaatcttcagcgtttttcctattaattccgtcagatatgcgatgccccgttctcttacgtttggaatcggcgcggcgctttctgcgggagcctgcacccgtccggcgttttcgggatgagcccgtccattcccgaattgccgctcgagcgcttctttacgggaagacagaaagtaatcagcaagctcatcaatggtttgatattcaaaaaacaaagtgctgctgacagaaccgaagacgtcttttaacgcgttggtcagtctgacgaccagtatggaatccaatccgtatgcggttaaaggttcatgggataaaagacgatgcgccggcactttaagcgcttcaccgatgaccttcttcatcagttcaacgcttttttctctcaggctgaaatgcaaagtatcatccgaaagaccatctgcgtcatacggacggcgctccggcttctcttctgacgcctgcgggagggcaagcctgaccgttccgtcactttcagccgctataatctgctggcctaagtcgtgtgcggcttcagccggaaacagaggatggacgaacccttcaagcgaaagcgcttccgcccagccggccggctcaacccccggacagcccggaatccgtaaatcatgatcctcatacagccaccagccttcaagaaggccgaacgtcacatggttgaatatggtgcggctgttgatctcatttaaaaacagctggccgtttttttgcagcattgctttcgcatggcgcagcgcagagcggatattttttgtcgcatgaagcacattggtcgcgatcactgcgtcatacgtgccgatgtcctgcgcttctgttgataccggctgctcagcgttgaatattttataagtgacataaggatattccggaccgaatatgtcttctgcatgtaaaagaaatgctttagaaatatccgtgaaacaatattcggcaatatgcgcttcatacggtttcaattttctcatgaccgcggcgctcgtcccgcccgttccggctccgatttctaaaatgcggattttcgcctgcgggtctttttccagacgttcccgcaaaactgcaatcaatgtgtcagcaagcttgtcattgaaaaaatcagaaatgatattattgcggtaaatgccttccacaagacggaaggaggagtcagggaacatcacttccgttgccggaagcttaccggttaaaatgtctggaagcacacgcaatgtctcttctgccaatctgacatgcgccctcatgtctttctggcgcagccaagtctcttttttccgctcccattcctcccacacctgccctagatccgttttttccggagcaagcgctaattcagtcaggaggacaaagctctctttcagccatctgctgtattgttccgttatgccggcagccgattgaaataacggcaaagcctgatcaagaccggctcccatctcataaagggttgatactagcattttttcaataagggattccaactctctcatgcagctcatgacacttgatgcttttaaccgctcagcttcgtcattgtgcgtgatgttaaccgctaattgtccgagtgcggaaggaatcttttccggataaaccgttacttgttctttcagatcgtctttcataaaaaccggatctgtcgttttgatcagcgccagctggtcatgaggtccggaaagcagggtttccagcgttttcatcgcttcgggcgcctcaatagaagcgattccgtcccgctccatccgtttccggtattgttctgaggccacgacgccgacacttccccaaaagccccaattgacaacttttacagcatacggcgctttctgtgagatccgcttagcaaaagcgtctttaaacgtgcacccggcggcataattgctctgtcccggcgctttttgaaacgacatcatcgaagagaaaaacagcaagaaatccaggggttccccttcagctacccgggcaatctgcaagctgacatcggtttttgcagaaagtgaagcgcggaattgatcctcttccatattggcaaaacttcggtctgataacacgatggcggaatgaatgattccgcggacctttccattttccttcacaatggtgtcatacgcccgtttgagagagtcataatccgcagcatccgcgctgaaatattgcggtgcgggacctaaagccgcaagtcttttcagccttctttcaatctgtgtatcttttttccttctcccgatccagacaattttcgcctgataggtctgaatcatatattcagtccatacttctcctattccgcctgccccgccgataatcacataaaccccgccgtgccggtataatgaaggctcatctgcctgaggccggcagacggccaattgctggcggtgccactgacctgcacgaaagacccacgggtttccctcggagtccgccggtaaagagaagacatcgggaagatgccggtatcccctttgagattccaaatcaagaagccggatgctccaattgctgtattcttttgcgagcgaccccgctaatccgtgtatgcttgcatgactgggattgacctcatcatgttcatgaatcggctgtgcttgaaacgtgcagattgtcaatgatagttgtgccgtatcaaaattcagaagcagaagcgcttttatcagccggaaaagctgcatgaccccgtgctcctgtccgtcggccgtatccgcatcataaacggatggaacgggatgatccggcgccgcccatatcatgtgttgaaaagagccttgcgttttcagtgtttcagccatttgttccgcgctgtccaaagaagtgatgtccggaaaacggacatcggaatacatctctttcaaagcctgctgaaaatccggcccggccccgatgacgattattttttcttcacgcatgaaaggcatgccggtttccggaatggtgacggtgttccaaaccggtgtcataagcaattccgtttcacggcttttcttcggcgtgacgccggctttttggttaaacccggcgctttcctgcacctcttttatgataaaatctttcactgccgccaacagcacgccgcgctcatcacaaatatgcagatcaaattggtgaacggaggccgcttttacctccgcatgcacaaatacggttttcgctaacggttcaagcagcagtatttctccgaaggaaaacggtacgataagcgcaggctctttttgaaattgcagcacatgcgccattgcggtttgaacagcgccatccattaaggacggatgtaggatgtactgtttaaaatcggcttccaagtatgacgggagcgttaatttggccagtgctttcctttctgtataagagaattcgcggatgacctgaaaactgtccttttgcacgattcccgcctcagagaaagagtgatagatgtctttcggctccgttctctgcgcaaatggcgccgggagctgaaaggccggggcctcaaaagacgctcctttttctttacaaatcacttctccttgcgaaaagagggtgccgtccgctcctttttctttaatgacatagcttatacgctctttttctgcttcaaactctatcatgacggatcttgggtctgtccctgtcacaatcggctccatgtaccacacactttgaagagagacggccgggcgttctccccacaatgccgcgccgtatgccgccatttccagatgacagactccgggaagcacatatttttcgttcactaaatgatctttaaagaaatattcatccttggaaaatatcttttgaaacgttcctttccggacggatgaaacattctcatcaagcagaggatgaagcgcttcacgccttttgatattttggggcttttttgtataccgctttttttgatcggtcagccaggacgtttcctttaaaaacggatacgtaggaagcggaactttctgatacggcgtttccggctttttgcaaccttgaaggcctttcacccacagcgcggcaaatttctcaggatctgaaacggactggcctgaaacgtccggccgcccgggtgaggcttttccgaagtacatatgcctgccgtcgctgtgaccgctcacaaatccgtccaatcgctgtttcagctcagaaagggatgatgcaatgacagcaagccggaaggagaagggctctctgcctgacaataaggtggcagcgatattttccagactgtatccgccggcagaaggcgagttttccaatcgggcaagaaagatgctcaatttcccggcatattctttcagctgttgttcggaatgtgcgcttaatacgacggcatgaggtttttgctcagtattcccgtccgcttgccgttttggctgataagcacctacaatcagatgggcattagagcctcctgctccgaatgaactgattgcggcgattctcggtttatctccttcagccggccacggccggttgtttcggacgacataaaatggcgaatcagaaaaagaaatcttgcggttcagttcctcggagtgcagactggcgggaagcgtttcatgtttcatgcttaaaagcaccttgattaaaccggcgatccctgcagccgcttccaaatgtccgatattggatttcaccgagccgattccgcagtcatttttctcatcggtctgtttatcaaatgccatagacaggccgcgtatctcaatcggatcgccgagcgccgtgccggttccgtgagcttcaatgtagctgatatccgccggacttaccgcggctctgtttagagcggataaaatcaggtcccggtgcgcttccggattcggcaccgtatacccggtcgttttgccgccgtgattagtggcggaccccttaatgacaccgtagatgtggtctttgtccgcaatcgcttttttcaatggttttaacaaaacggctcccgcgccttcgccgggcacgtaaccgtctccgccttcaccgaaactgcggcattttccttcagaagacagaaaatgcgattggcttaaaaacatgtatttttgcggatgtaagctgaggttgacgcctccggccagcgccatttcacagtcgcccgacataatggcctgacaagcttgatggacggcgacaagcgatgaagaacacgccgtatcaacagcaatgctcgggccatggagatcaaggaaataagaaaccctgttcggaatgccccaatataaggagccggggcctttgtactgatctttgaggaaaccttcttcgtgtgcaattaatgaatattcattccaggtcactccggcgaataccccgatttgatccgtcggcctcgccgccgggttcccgtaaccggcatcctccatcgcttcccagcagcacgtgacatacaatttttgctgagggtccattaaatcagcttcccacggggaaacagaaaaaaacagcgggtcaaattgatccggatgatcaataaaacctccccatttactgtatgacgcgtattctgccgttttctcttccgagtaataagagctgtcccatctgtcctctgggatttcggagacacaatctttattttccattaaattgtcccaaaaatcatgctggttttccgctttcggaaacatcccgctcattccgataaccgcaatatcagagctcccgtccgttgccggttcaggcaccttttcagccgcctgtacaggaagcaattcttcttcctgccggcttcccgtatcaggctccgtttctgtgaattcaagaacgctttcgggatttcgtttctgcgcacttaaaaactcactcaatttctcaatgttcggatattcaaaaagcagcgtttcagaaaggccggtaaattctttatgcaatatggtcatgatttcttcactgatgagagacgtcacgccaagagtgaaaaaagcggttttatcttccgcttcggtcacctcggcacccagcttttgcgctattaccgttcttaaaaattcgttaatacatttcatgaggataccatcccttgtacaaaagaatttttctgtgctttaacaagttaatccgccgtctatggccattgtctgtccggtcataaaggacgattcaggagaaagcaggaaacgaacgagtccggtcatatcgtctgtttcgcctaaacgtcccatcggcgtccttctgataatctgcgatttttgtttttccggcatatttttcgtcatatcggtgtccacaaaaccgggcgcaagtgaattgacacggattcctttcgacccgagctccctggccaggcttcgcgtcaagccgtcaagagccgctttggatgcgctgtagactgaagtgcctttaaatcctcttgagccgataatggagcttatgttaacgattgatccggaattttgtttcagcatgacacgggaaacgtttcgggtcagcttgatgactgaaccgatattcagattgagtatgcggtcaatgtcttcatcattggtcaggggcagcagctgatcaaggttcaaaccggcgttattgaccaagccgtctattctggaaaacttgcggtatacttgaagaacaaactgtttcatggcggcatcatccgccgcatccgccgcttcccaataaaagcggccgcggtacttttcactgtctctcaatgtgttaataaaatcagattcactgcggctgaaagcggctactttgtaatcctcatccaaaagcgtctgtacaatcgcttttcccagcccccggcttcctccgctgacgaccgctacttttccgttattcatatttgcctcctgttttacacgtttcttatttttttaaatcgatcattagacagttttcgatctgtaacagagatgatctgcggtatctgatatggctgcagcttctgtttgcaatgagctacggcccgctttctgaaagatttgatatcttcttctttttcgagcacggcctctgccgcaacaatctcgcctgtaatcggattttttctgcccgttatgagaacatcccggacattcggtatctccagaaagacgctttccacctctgccggaaacactttctctccgcccacattaatgatttcactctttcttccgagaattcttatatattcgccgtctgtttccacctggtcaccggtgtcataccagccgtcttcatcgaaaggtgacggtgcgtttaaatagccgagcatcgccgactcagaacggacccaaagcgtgcctccggtaattttggtctctgttccggcgccgcctactttcatccaagtggattggctgtcttttgatttcgttgagaatatccccagttcagttaatccgtatgtttgtttcagccgtacatccggaaacatccggtggatgccgcgcagcgttgattgcggcatcggctctgtgccgtaagtgatcagccggagtgaagagaggttatagccggcatccgccttggacatcagcagcatgtttaaaaaggtcggggtggcggggagcacttggacagcatgtttgtcgaccgcctgataaacggactccggcgttctgctgactgatgtgacgatcgttcccccgttaaacagaatcgcaaacagcgtattaatgccgccgatatgatctaatttcagaaaaatgagcgtacgcagcggttttctcttcgccgttttatatttttcaagcagccggccggcgcttaacacggatgctttgcttttgccggaggttcccgatgtgaaaataataatgcctgattcccctctctcgcgcaggtcatcaagcagagggtgagaggcgctttcagaaccttcacgaagcgtccagctgtcattttcatttatttcaatgatttgattcactttcgcgtcttcaaacatatcgaggtgcttttcccttgattcattgctgagagggacaacgatatttcggtttaacaaaagcgccatcagcaaaaaaatggcgttcggggaataatccccgataagcgccacacattctccttcacgtattccgttttgtttaagttctttctgaaaaaagctgattcgtgtcagcaaatcatcatacgtaaaagtctgccctttaaaaatgagaaactcactgtcttgcgtttccctaagcttatcagtcacccagctgatatctcccctgctttctgttttcatgattgagcactgtccatatatttttgataaatatcacaaatgctgccgacggttgtaatgctggaaatcgtttctccttgggaaaaaggatctactccggtttccatctccatctgtgcgactaattgagcgatatccagtgatgagaagcccagatcctctatgactctcacatcatctcccgcttcgacggcccgatatgactgctgttcttgaatgtcctgaatgatttgagcgatgatctgcttcatttccttggtttgttccatttgctttcagctccattcttcattttataaacttctgatgacccgtttataatccggaatatgatcttgtgaagaggtcggcaccgccagcagcttatccaccttggaaatggccagcaatgtatgatttcttttcatatagacttcaatctgatagctgattttcgccactgagatcatactgagggactcaccgtgaaagtcgggatcgcattcttcaatgtgtcccgtcatataaatatcaagctcttcatctgcaaaacaatttccgtaataatacgtctctctttcaagcaaaaataaatgccgcgcgattgaaaccggaaaacccggcttcgaccggcgcgtcatccattcaaattccgccgcatccattatcttgctgaatttcgcaaacaccatggcatgcccaggcgcagcatcctgatcaacaggaacccgatataaaacggggtctgctgttttgagattgcccggcttcataccgaaggcgtccgttctgattttctttgaccgcatcagcgcgtaaggcggcttggctagcttagaaagttccgcaatgcactcagccttaggcgctgagactttgcgggtcgaaccttctgtttgtgtgacgtcgacgacaattaaactattggctttcattgaaggaaaccgtccccggtcccactcgcttttatcagagctgaccgctcctttcggcccgaacaaataatcagattctaatatggtttctccaaagcgggagatatcgactccgacggaaacctcgtcccataatcggtactgatcaagaggctgatctgaaggaactttgagatgtgtcataaaataagccggatacaaaatcagcccttggtgatcggccatctgatcaggccggaatcccgttccggccgttaaatggtgactgtgtgcgttgccgaataacagcagcagcgcgtactcattcaaattccctaacccgacatggctcatcgttaattcatgattttcaatcagcatggtctgtcctccgcagaaaaaatgtaatggctggtcatactcagcctgtaatcgataccagcctttgcgcaagaaggccggctgtttcttccatgagctgtttgccgatcagatcgacatgcctgtttctccaattttcaagcggggttcctttcacccactgattaaacgcgccgagtgcagggccgcaatgaatttggtaatctattttactttcgctttttccttccagagcgagccttgtcgtatgagaaaaataccatttaaataccatcgccattttgtgtttcggattctgttcggctttggcgatctgttcaggagatttatcacgtttcagctgctcatacacttcttcaaaaccgcgctggaaatacttttcttcaattaatgttttcgttttttcatctatttcatctaaagaattgtattgtctgtacaagtcaaagagtttattggctcttgccgggaaaaacagtccttttttcagcacctgcacccttgctcccgcttcaaacatatctcccgcgggagcgtatgacgtatcctgcacgttcgcttcctgaagcagatctttcactgaatcacttgtcccggcttcgaccgtgcattgattaatagaaccggttccgataaattcggcgccgagcagaaacgccgcagcagccgcttccggagtgccgatgccgccggctgcgccgattcttacttttttcgcataaccgtgcttctccatcatgcggtctctgagtctgatcatggcaggcattaatgtatacggaaccccttggtcggtatgccctcctgaatccgcttcaacgcaaatgtcatcagccatcggaatttcttttgcaagcgccgcttccccggctgtcagccgattatcagacacaagtctttccagcacatgagccggagccggattcagaaaggcctcagcgacttcaggccgggatactttcgcgatgattctgttttgaactgacaccgatccgtcatgattcctgcttaatccctttgccctgtatataacgagagcgggggttatgcccataaatgccgatgcttcaataagatgaatgccgttttttaaatataaatctatcattctgacttccttgtcaggtgacatcatatgatgaagaagattcattccgaatgtttccccttgccgcaatgcagaccggatggttccgatggcctgtccgatccgttcgatactcaatccgcccgttccgaaaaagcccagcattcccgcttttgccgctttaatgaccatctgttccgaagcaattcccctgtacatggagcccgtcatgtaagcatattggatgttataatcttttttaaaatcttcgttccctaatctcattcccgccgttttttgcggatcagctgccgatgctttgacatcagcagtatcagactcttctttcggcataggtaatggggcggcatcttttttaatctgccgcgtcagttttgtcagcacttccccgggcccgacttctgcaatttcattattttcaagtcccatcagacggcgtatcgtgtccgtccactttacctgattggtcatttgcaaagtcagatttgttttgatttcatcattcttataaggtgcggcatgaagatttgagatcaccggaaaacgaagaggcaaaaacgccgttctttctaaataatctgcaaactctttttcagcatctttcatatagcgggaatggaaagcgccgctcacatttaaaggaaggtacattctcacgccggctttttcaaagacggggcccgctttttcaatgtcttgtttcgttccggcgatcacaatttgcgaaggtgaattgtggttagcgatatcaatgccggtcagatgataatcggatagaacctcttttacttgttcagccgtaaaccccaaaaccgccgccatgcttccgggagctgccttgctcatgagctctcctcttttttttacaagctgcaaaccggtctcaaaatcaaagcagccggccgcaaataacgcattatattctcctaaactgtgccctgcggcgtaatcaggctctctccccgactctttcattttctttaaataactgagtgcactcaccgtatataacgccggctgggtaaattgcgttttccccagctggtgattcggatcctccagacacaattcttctatagagtagcctaatatgtcatcagcctgacgtgtcagatcttgaaattcatcaaacagtccggctcccatccctttaaattgagaaccctgccccgggaacacaaacgtaagcatcttatcctcatcctttccgcatcgccaattttgtacatcacatgtggttctccatacaaaaacgtctcttatttcatatattgactggtgtaaacaccggcataaaaataaaaacacaaacgcgtttgcgattcagcacaggtttaaaaatcgcaaacgcattgtgttttccttttctaacataatttatattaaaacatattgcttgtttactgaatgtttctcatgacaagctgcagtgccaatatgcccgaaaacagccatgacggcacacttctcccttatcatgtatatgtagatatatacactacaatcatttttataatccctacttcctcttcaacgtgccgaaacagcgattgaaatttaataggtgctttacatcaatttaataaatttaacaaatagttgctatttaaagagaataatatcaatttatagataataatgtcaaggctttatttcgttattttctgacatttattccacagttttatattcggtgggcagtcggcataattgtttcgggataaatgtcagataattccctgaacccttttcatgtcaaagaaaatttcatcgcttctctgtcaattgggtctatacttatttttcattttcatatattatgtaaaaaaaagacgaattagaaaaatttttaatcactttaaatac

SEQ ID NO: 31 - DNA, 106026 bp, Bacillus amyloliquefaciens
agcttcttgtccccgacaggggagaagacaatgtattggcggggctggccgctttcctgaaaacggctcaccttgaacatccgaagctgtacggccaagtcatccaagccgatccggacgagtcagcatcagcgcttcttgccaagctgaaagaaaaccgggcgcatcctgaacaagcggaaatccgttatgaagacggcaaacgtctcgtcagagactggcgtcatctgccggcctctcaaagcggcgccgttccgtggaaagacgaaggggtctacctcctcaccgggggagcgggcggcatcggactgattttcgctgaagaaatagcctcccgcgtcaaaaacgctgtcctcgtattaacgggaagggcagaagcgcttgatgaagagcgctccgcccgcttacggcgcttggaagcgtcgggcgcccgcgtattgtatcaaccggttgacgtgacagacagagcggcggtcatcgccctcgtccgcggcatacaggaggagcacggaacactcgacgggatcattcacggcgcaggcgtaattgctgacaactacattctgaaccagacagaaaacgaacggaagaccgtcatggcgccgaaagtgaaagggcttatcaatcttgatgaagcagcgaaagatgtgcggctggacttttttattctgttttcttccttggcgggaggcatgggaaatccggggcaggccggttatgcggcagccaacgcatttatggatgtttatgcagcccgccggaaccgtctcgtgcgggacaacgagcggagcgggcagaccctgtctgtcaactggccgctttgggaagaaggaggtatgcgcgtggacaaagagaccgaacggctgatgtacgaacagaccggaatgaaagctatgcgatcagcctcaggcatccaggcgctttacgcggcttttgcctccggagaacaccaggtcatggtggcagagggcgacgaaaaacggatccgcagccatattttcgatctgggggaagaacaaagcgccgccggacaagctccggcagtggcagatgcaagagatctgaaagatcaggttcaagagaaactaaagcggcatgtatcagatcttttaaaggtaagcatgaaagatattgaggctgacagcgaactgacggaatacggatttgattcgatcatcttcactgaatttacaaatctattaaatcggacttatcagcttgagctcagcccgactatcttctttgaatttccgacattgcgcaaactgagcggtcatttgatatctgaatggaaagaagcgttcagcggcttagaaagagagagtttaaaaaccgctccaaaagccggaataagaaaagctgaagctccggcggccgttcatgtcaagcgggaaacgcccgtatccgtaaaaggaaaatcagaagaaaaaaccgaaccgatagccattatcggaatcagcggtatttttccgcaggcgaaagacatagatgaattctggacacgtttacaaaaaggggagcattgcatcacagaaattccccgagatcgctgggattggcgcgaatattacggcgatccggcagcggatgcaaataaaacgtcaattaaatggggcggttttatagatggaatcgccgggtttgacccgctgtttttcgggatatctccgaaagaagctgaaatgatggatcctcagcagcgtctattaatgatgtatgtgtggaaagccattgaagacgcggggtactcagcaaaacggattgccggaacaaaaaccggtattttcaccggcacattgggaagcggatatcaaaccttaatcaataaggcgggtcttcctgtcgaggggtatacgatgaccggaatcgtgccgtccgtcgggccgaaccggatgagttattttcttgatattcacgggccgagcgagccggtagaaaccgcttgttcaagctctttagtcgccattcaccgcgcggtaaaagccattgaaacgggagattgtgatatggcggtcgcagggggcgtcaacacgatcgtcacgcctgaagggcatatcggttttcaaaaagcaggcatgctcagtgaagacgggcgctgcaaaacattttccgatcaggctgacggttatgtcagaggagaaggtgccggcatgattgtcttgaaaaagctttcagaggcagagcatgacagggatcacatctacggcctcatccgcggtacagcggaaaatcacggcggacgctcagcgtcgcttaccgcgccgaatccgcaggctcagacggatgtgctgaaaagcgcttatcaaaaagccggtattcacccgtcaacgatcacttatatagaagcgcacggaacaggaacggcactcggagatccgattgagatcaatgcattgaaaaaagctttccaaacagacggggctccgggcggatattgcgggataggctcagtgaagacaaatatcggacatttggagctcgcggcaggtattgcgggcgttatcaaagtattgatgcagctgaaacatcggacgctcgccaaaagtctgcattgcgagaacatcaatccccatatcaaattgaaggacagcccgttttacattgtgacagaaacaaaggagtgggaagcgctgcgtgatgaaaacggccgggtcctgccccgccgggcgggtgtaagctcattcggtttcggaggcgtcaatgcgcatatcgttattgaagaatacatgggcagaagtgagacggaacagcaggaaacccgtgagaaagcgtcatctctttttgttttgtcggctaaaaatgaagagcggctgaaagaaagagcgcgtctccttcgcgattttatccaaaacggatcatcccgccatatcgatcttgcagatgccgcatacacactgcagaccggacgggatgcgatggaagcgaggctgggaatcattgcaggctccgcagaggaactgactgaaaaactgaacgcgtttctattgggaaaaaacagcgaagatatcatcagcggccgtaaaaaacgcgagaataacacgatctccatgttctcagacgatgaagacgctgctgacctcgtcagcgcctggcttgagaaaaagaaatacaggaaagtgctgcggctctgggcaaacggatttgacacagattgggagcagctgtatacggacagtaagccgcgccgcatcagcctgccctcctatccgttcagagccgaccgctattgggtgccgaaacgggagcagctgccgctttcgaatcaaaaaacagtagtattgcaaaaaacatgggaaccgtgcgaggcagtgtcttcatccgagccgttcaacagcaaaatagcgctcatcgtctccgaggatacaaaagaccttgccgccgaggtgaaaaaacagctgaatgatgctgacattgtgcaggaaaatcagctcatctctttcttacaggatccgaatgcggccatctattcggggtttattgacttcaccggctgcggctcccgacaaaagcggcaggacatcagctgggtggcatcgctgcagcagctgattgaatacggccgcggacaagaaaacataaaaatgctttatcttacaaaagggcttgaatccttcaaaaataaggcggccgctatgcatggtattgaaaaagcggggctttatcgcatgctgcggcatgaatacagccatattctcacctgtcacgccgatattgatcctgaagagccgctggagcagacagccgcttttattaaacaagaaattgaatcagacttaacggaatctgctgtttgctgcagggacggcatgcgcttcagctatgttcttcggcagactgatcagattgaaccagaagccgtgcaaacagaccggactgcgtttccaaaagacgccgtcctgatgataaccggaggaacgcgcggactcggcgctttatgcgccaagcatttcgtttccgcatacggtgtgaagaagctgcttttgacaggcagaaaggagctgccgccgaaaaccgagtgggatattgagcagacagaccctgtcgtttcggaaaaaatacagcttatccggcagctggaatcacaaggcgtagaagtgtgcgtctcagcagttgatctgacggataagcaggcagtcggacggcttataaaagaggtaacctcaacgctcggacctgtcggaggcattctgcattgcgcgggaattgcggaccgtgaaaaccctgcttttctccgcaaatccaaagacagtattgcgcgggtgctcgccccgaaagcagacggccttcacagtctgtatgagagtgtaaaggatgatgcgccggcatttttcgtcctgttttcatctgtctcggcagccgtcccgattcttgcggcgggacagagtgattatgcgatggctaattcttacatggactattttgcagaaaacaatgagagcgacatcatcagcatacaatggccggcatgggatgagacgggcatgagcaaggatataaaaagcgggatttatgagcaaacgggattgctgcggcactctgacgcggaaggtctcaagatgcttgattacattttaagagaaagacccggagctgtcgtgctgccggcacaagtgaaacatgattgggacatcaaagcgctggaaaacgccaagccagccgcccataaaggaatgaaagcagcttccaaacctcctgaaacaaaaaaacgggaacataaccggattgatattcaatcttggctgaagtcgcttttggcaaaagagctgagtatcgatgaaacgcatatggatatcgatgtgccttttcaggaatacggaatggattcaatctttctggcgcaagtactgacaaagattgatcaaaaactgccgtccgtttcaattgatccgactgtccttctggaacaccctaccatagaacagctcgcggattatttagccgcacattgtccggaagctttttcggcagatgcagcagtttccgcggagaaggttcctttgcagaagacgccgaaacggagcaaaaaaacggcagataagcctgagaaacggggaaaggttgcgatcatcggcatggcctgtcattttccgaaagcgggggatataaaagaattttggaagaatctccgcagcggaacggatgccgtcactgaagttccgccggacagatgggacaccggggaacactatcagccgggtgaatatcaagaaggaaaaagcatcagtaaatggggcggttttattcacgatattgatcaatttgacccggagtattttaatatttcagaaacgctggcaccgatgatagacccgctgcaaaggcagtggctcgaagtgagcgcggaagctttggccgatgccggttatcaaaaagaggatctctggggccgccgtatcggcgtttttgccggtgcaagggcaggtgcgtttcatcagaaatttcaatatctgcaaaaagacgcgattattggcgcggggcaaaattttattaccgcacatatggcgcacatttataactttacagggcccaacctggtcgtagatacggcctgctccagttcgctaacggcaattcatttggccgtgcaggctattcaaaatggagaagcggaagcggcctttgcgggcggggttgacattttgcttgatgaaaaaccttttctcacaatgagcgcggcgagaatcttatcgccaaacggccgttcaaaatctttcgatgccgatgcggacggaacaggaataggagagggctgcggtgtgctgatgctgaagccgctcgaaaaagcgatagaagacgaagataaaatatacggcgttattgacggctctgcgattaataatgacggcagcacaatgggcgtgacgacgccgaatccccgggcgcagcaggacttgattgagcaggcggttcaatcagcggaaatcgagccggacaccatgacatacgtagagacgcacggaaccggtacattgatcggcgacccgattgaattaaagggattaaccaatgtcttgtctgcttattccgatgaaaaacaattttgcggtgtaggaagcgtcaaaagcaatatcggccacttgctgagtgcggcgggcgcggcgggaatcatcaaagttttgctggcgattgccaatgaagaactgccgccgactttgcattgccataaaccgaacccccgctttcaatttaatgattcaccgctttatcctgtgcttgagctgaagcggtgggacggaaaaaaagagatactcagggccggggtcagcgcgttcggtttgggcgggaataacgcccatatcattgtcagcaacgaaggaattccgaaagagcgaaaagcgaccatggaaccgaaagccggccagacagtataccgaaaacagcggtattggcctgaaaaagcacagttgcccgaagcagaagaaaatgaggcgggcacagaagcaatgtttgaaataagcgaggtgtgatagattggcagttgccaccgatcaagtcaaaacgttcctgcagaaaatcagccatacgaattatatcgtccgggatcatcgcgttcatcaaatccgcgtcctcccgggcgtgactttaatagatatgctgtatcggctcgccgccgggtatctcggtgaacggcctatagaattaagacagattatttttaagcagcctgttgtaacatctgaagagtttgataaacacctgtatgtgacctttacgccggcgcgtgacagctggaaagttgagatcactagcgaaaaagcaaaaaatggcacaccgcttggcggaaaccgggatgagaatatggaatgccagctttatttgcaaaaagacacgccccgggcaaaagaactgaatattgaagcattcatgaaaaacgcaagccgaaaatgggacatgcatgacatttacggaattgcaagaagaagccatattgaacatggcgagtttatgaaaaatgaaggggccgtttatcagcttcaggataaagaagaattaatggagctcactctgagtgatttggctgaaggattccgggagaaatttaaggcgcatccggcttttttagatgcgtccacccttgccggctcttcctttgcattgtcggcccaaaagcaaaatgacacaccttatattccttttatgatcaatcgtttttgcatgtatcagccgtttccgaaaacgatttacacttattctgcgaaaaacagccgcactgaaagcggcgcatcagacagcgaacctgatgtttattcggccgacttcacgatttacgacagggcagggaacgtattggccgaatgtgagaaactgacagtaaaaagggtcagacaagcgaatatgattacccatctgatagacaaagagaagccgcctcagcagaatagaagcggccgtggtgagcccgaaagtcctgtggccgcagaagacgtgtctgaacagcaaacgccggaacaaaacatggtgacttacataaagtcggaaatcgccaggctgatcaatcgtccggcacaggatattgatgtgaggaaaggcttttatgatatggggcttgactcggcgcatttgctgaagcttgtaaagatattagagcagacttttcagcagcagttttatccgacactgctttttgaatattcatcagtccgccgccttgcggattaccttatcaatgaagcgggctgtgtgctgaaagattcggccgaagaacagcatacatcagatgctgacatcgctgatgaggttctgttttttgaacccgcctggaaagatcatccgctggaaacggcggtgcagaacgggcaaaaacacacccgtcatctcattatcgctgccgatgcaggaccccgtctcaccggtgaactcggcgcacattgcccggaagcggaagtgatagaactgaaaagggagcatgaggctgcagatgagcagtttgaagcagatgccgagcgcatatttcgtatgctcaaacgggaactgacagaccatccgaaagaacatacattgattcagcttgtatgcgccgttgagaatggagcggcattgtcttccgctctcggggctatgctgaaaacggcacatctggaaaatccggctcttcgcactcaggtgatcaccttctgtgacaagaatgagagattgccaagtgagacggccgcaatcattagaacagaagcagactgctcttatgcaggctgcacagacattcggtataaagacaatatgcggcagatcagattgttcgaacgtattgagaaactggacgggcagacacagtctccttggaaacaaaacggcgtatatgtcattacaggaggtctcggcggtcttggatttctgcttgcccgtcaccttgcagaaaaagaaaaggtgaagctcgcactcatcggccgttcgccggaacagtctgagaagatcagcagactgaaagcattgggcgcagaagttctttacgttcaagcggacatcggcaataaagccgaaacagagcgggcatttgctcagattacagaaaccttcggccggctgacgggcatttttcattgcgccggtgttttaaaagatcaatttatcatccaaaaagacagttctgacttgaagcaggtgtttctgccgaaaatcagcggcctgattcatgcggacgaagcttcacggcatgaaccgcttgaatttttcgccgtattttcctcattctcggcgttggccggaaatgcgggccagacagattatgccgcagcgaacgcttttatggatgaatatatgaaatatcgcgattgcaaagcggaaaaaggcgaacggaccggggcttctatgacgatcaactggccgctttgggaagatggcggcatgcaggttgacagcttgatgaaagagatcatgaatgatgcaaccggcaccagcccgcttccgactggggaagggatggcttcacttgaatatatgctgcgactcggcaagctgcaatctgttattttatacgggaaggagccggctgtaactgaaagcatgggccgattggatcaggtggcagacaagaaccgctcttcattatcccatgcagctgtcaagagaaggagccgaaaacaagagagacacacagaagagcacgatattgcggtaatcggattggctggaagatacccgcaggcgggaagcatcgatgaattttaccaaaatctgcgctcaggaaaagactgcatcacaacaatgccgaaggacagatggaaaggttatcctttctcatatgaagcagatcagttctaccgttacggaggatttttagatcgcatagacagctttgatccgctgtttttcaatctgactccgcgccaggctgaaatgatggacccgcaggcgcggctgtttttagagacggcttgggaagcttgtgaagatgccggtttttatcaggacagaacggcgcgcgggccatcttcacaaaagagaaaacgcgtcggagtattcgcaggtgtgttttggagccattatgagctgttcggcgctgaaatcacacagcggggcacaccgctgtctatgggcgtgacgcctgcctctgttccgaatatcgtgtctcactgcctgaactttacagggccgtcaatggctgttgatacgatgtgctcttcttcgctcacatccatacatttggcatgtgaaagcattaaaaggggggagtgcgaattcgcccttgccgggggtgtgaatgcggtcacacacccgcataaatatgcgtttttggcgaatgccggatttctgtcttcagaaggcgtctgcaaaagcttcgccgacggcggtgacggttatgtgccgggagaaggcgtcggcgcggtgttactgacaaccgttcaagaagcggaaagaatgggctgtccgatatatggcgtcataaaaggctccgctttaaaccatgtcggaaaaacatccggtttgaccgtgcctgatccggcatcacaggcggaagtcattacagattcttttcagagtgccggcattgatccggagacactgagctatattgaagcccacggaacaggcacctctctgggtgatccgattgaaattgaagggctgagccgcgcattccgcaaatggacaaacaagaagcggttttgcgccattggctctgctaaatcaaatatcggccatttagaaggagcggccggaatcgccggattaacaaaggtgcttttgcagctgaagcatggagaaatctttccgtcattgcacacggacacgctgaatccccatattccgtttccggacacgccgttttatgtggcggaccggctggaagaatggaaacggccgtcacattctgacctgccgagaagagcgggtttaagttcttttggcgccagcgggagcaatgcccattttgtcatagaagaatatctgccgccgcaggctgaaaagaaatcggtaaatatacgggaagacgagccggttctgtttctgctttcggcaaaaaatgaagaacgcctattagaatatgtcaaacggtatgaccgctttttacgggaaaaagaagtcaaccttaaagacctggcctacacgcttcaaacaggcagagaagcgatgcctgaacggctggcattgatcgttacatccgtttgcggcctgcaagcgaaactgaaggatgtgcttgaacggaaaacagaaattgaaggatgtttccgcggacgtgctcaagatgatatttcatcagcaggaatggccgggctgctgaaaaacaagcaatattccagattgctcactgagtgggcaaaaggagccgccgttgactggagcctgttatacgaaggagagaagccgaaacgggtcagccttcctgtatatccgttcgcgaaggagcggtattgggtgcctgtgcccgcggatatccggaaacagacagacgaaccggcggaaaaccaaaagattattcttcaaaaagactggaagcagcaagatccggcggaatctgaagcattatcaggaacagtaatgatacttgcaactgataagacaagccgattggccgatgctctttttaaaggaaacagccatattgaaacgatttgcttcatccatcaggcaaaagacggcgccgattattacgccgccgcatcggggcgaaacctttacggcagagtgcgggagtctcttcaaaacaaacagatactcggggtcgtcgacataaccgcatatgacgcggaatatgaacggcgggaagagatagaacacggaaagcttgcctttttacagcaggctcttgaatcattccgtcataggggcgctgtgttcagccaagtgacacaccgcctccagcctttcaaggaaagtaaacctctgatgcaaggggcgaaaacggcggggctgtaccggatgatgggcgctgagtatgccaacattcattcttttacgatagatagcgattgtgagattgagcatacagaagaattaagcagacagattgagactgaatttttacagccgcgggccaaaagcggcagtgaatgctgctacaggctgaatcgccgttatgtgccgtttctgaagccgggtacgaatgtgtctgtggcgcctgagctttcctattcgtctgatgatgtgctgttaataacgggcggatcgcgcgggatcggcgcaattgcggcggagcatgccgtttcacgcgggtgcagaaaactggtcatcatggggcgggagccgcttcccgattcctcggagtgggcagacatgaaaaaggacggcattctcccggaaaaagccgagcggatgcagaggttagccgagcggggtgcggagatccgttattacagcgtttctcttacggatcaaaaggggctccggaacatgacggacagcatccgcggcacgatgggaccgattaccggtgtttttcattgcgcgggtgcaatgggagaacaccccgctttttataacaaaaccgaaactgagatcgaaagcgtttgcacaccgaaagtaactgggctttgcgatctctatgaagccgttcggaatgagccgctgtcgttttttattttgttctcatccgtttcgggtctgatcccttcgcttgctgcggggcaaagtgactacgcgatggctaattcatttatggactcttttgcaaatcatcaggcaggtaaaggaaacgtgtttgttaaagccgttcaatggcccgtctggaaagaaaccggcatggctgaaggcctgccggaaacacctgcttatcaaaaatcaggactttccaggctgtctgccgaagacggactgaagtttttagattacatcattttaaacggacaaagctgcggaattccttgtgttcccgaagacagtaaggctgattttggtgatcttctgaaggtgaagaaaactgaagctcacatgaaaaaaagcactgccggtgaccaaaaggtgaaggatatgattcgtcaatgggtgcgcaccgttttcagcgaagaactgaaaatgacggatgagcagataaaagatgatatgccgtttgatgaatacggaattgactcaatactctttgcggaattggttcaatcattgcaaaaacggatcagcataaagttaacaccgtccttaatgcttcaatatcaaacgattacagaaatggttgactatttcgcagcgcatcatgaagccgattttgtgacaaaagaaaatggtttcgttcaagacggggacgtccagcctgatgtaaccgccgcctctgaagagagaacattcatgaagccgaaagcggataccgaagacgatattgccgttgtcggcatgtcctgccgttttccgggggcgggcggaacggatgctttttgggagctgctgatgaaaggaaacaccgccattcggcctgtccccgcatcgcgctggcatgcaacagcaaatgcaaaggattatgcggggtggattgatgatatcgacatgtttgatgcgggctttttcggcatctctgaaaaagacgcggcagttatggacccgcaggcgcggatcatattagaagaagcggttcattccgtttatgatgccgggtacggccaaaaggatttatcgggccggaaagtcggcgtgtacatcggcggcagggcgcagccttcagccggtatggaacatatcctgcaggcgcctaacccgattttgggggcggggcaaaactatttggcggccaacatttcacgatttttgaatgtcacagggccgagccttgtcgtggatacagcatgttcctcagggctgatcgggctgtcctttgcaaaagacgcccttttggccggaaggattgacgcggccttagtcggttcggtgagtctgctcttatctccgtccgcgcaccggttattcggagcacgccatattttaaatgagaacggcgtgtttcatatatttgaccgtgaatcagcgggagaagtgctcggagaaggagcgggggcggtttttatcaaacgattgagcgatgcggtgcgggacggagaccgtatttacggcgtcataaaagccgtctcggtaaacaatgacggccggacgctcggtcccggttcaccgaatataagagcgcagagagacgccattcaaactgcgcttgacatggcggaaaagtcgcccgaagacattggatatatagaagtgaacggaggcggttccccaatcgttgattcggtggaaatcaaggcgctctcagatgtctatcagctgaaccggaaaacgcttctgccctgccggatcggatcggtgaaaccgaatgtagggcatttgcttctgtcttcaggtcttgcgggcttcatccgatgtgtgctgagcgtctatcataagcggattccgcctttcttatcagcgcgtgagccatttgaacattatgactttgaagcgtcgcgtattcattttaatcgtgaacccgttgattggcattcagagaagaaaccccgcgtcgcagctcagagttcatttcctgacggcgggacaaatgctcatatcctcgttgaagaatacagaggtgaaaggcagcgggaacatcaccgggcgcctcagccgccggaattcagaaaaaaacactacccccttttgggcggctggaacagcacggagaatgaagcagaaaaaacaagtaatgaaaaaacagacattgcggatcttttaaagaaatatgagaaaaaagcagagacaagcactgcacctgcagactcgttttggcaggtgacaacgtgacgtttttaaaaggggactaaccatgaaaaaaacagtgaatctgcgcctgacggcagaacatcccattatgaaaaaccatcttgttcacggcgaatctgtcatgcccggtctggcctatattgatatgctgtatcagctggcaaagcaaagccttgatctttcattccgttccatctgtctgaaacgggtgaccatttatcatcctttatcagtgaagcggtcagagcggcttgatgtgagtgtcatattcagtaaagaaaaggagttctggactgcctcgatttgcggggcggattccgggacggttttcttatcagcggaggtgcatgaaggagtcttctcatcagataggcgccttgacgcagaggagaaaaaacaacaagccgcacttccatcagtctctttgcatacggtttacgaagacgcgagaagccgcggactgacgcatgacgggctgatgaagccggagggagagatctatgcaaatgaagaggaatgtttccttgatattcggcagtctgattcatgccaggaaaatctccccggcactctctttcatcccgcgctgatggacggtgccgccatggcctccggcgtattgcagacagctgcaggcgccggtttgtttttaccgatttattatgattcgtttattgccgctgagacggttacggagcgctgttacgcggtgatttcgaaaaagtccggcacgccgtctgaaatggtgaaaatggatattgacttttacaaccccagcggtgcgcatattgcttcactgctcggcctgacagccaaaaaggtgcggacagaccggcagctgataccaggcgttcagcagatggaggaaaccttataccgcattttctcaacatacgtaggccgtcctgtcacaagaaatgatgcgcacaccgtgttttttgaattaggtcttgaatcgtcacagcttctggccattattaaagacatcgaagaggcgtttgatctgcgtctgaatccgactcttttatttgaatgcagcagcatatccgagctgcttgaagacataaaaacaaaagggacagatgaatcttccggccttgttgcgaatgcagcaccggtctctgaaacgcaatcaggcagtcagacatttactttctatgaacatgaagcattccttcaggatcatctggttttcggcaaaccggcactgatgggtgtagtgtatccgtgtctggtgcttgatgcatccggaacgtctcattccgacacgtatcccgccgagctgaaagatatccgttttacgggcgggcccgtcacgctggagccgggagaggccgcacatgttgacatttcatttgcggcagaaaagagtgccgaacgctttaccgcaagctgctctgtctccggtaaagaaagccggaagacgtgtgccgaaggagaaataatcagatatacagaggcatccgtaaaaaaatcatatgacgttgaacaaatgaagtcgcatgcacaaaaggtggcgccggatgtcatttcccgtctgtacgattcggttgccggcttcacgataggcccgatgctgaaaacggtaacggcgggatacaaaatgagtgagagctcctttttattgcagctggacttatcaggaaaaaaagaaaaaggcgatctgcatcactttgcatttgacccgcttatattgaattcttgttatatgtcgctcggtgaagaagaattgcagctgaaaaagcggattcacgtcccgctcatgattgagaggctgacgctttacggacctgtcatgtctgataccgtctatgtggtgaatacaatcaaacataaaaaagacgggttcctctcatttgacgccgcagtcctcagccataccggagaacagctggcggaattgaaaaacgcgtctgtgaaagaagtgcttcagccaaatcggcttgaaaatgcgtcttttgccccatccgggaatcaaagccgtcagaaaacgaaaggaaacccgctggatattgccattgtcggaatttccggcaagtatccgcaggccgatgatatcaatgcgttttgggaaaatctcaaacaaggaaaggattgtattaccgaaattccgaaagaccgctggaaatgggaacattacttttccgaggaccgtacggcgccgggagcgatctacagcaaatggggcggattcattgacgggatcgccgattttgatcctgagttctttaagatttccccccgtgaagcggaacaccttgatcctcaggaacggctgtttttaatgcatgcgtggatggcgatggaggatgcgggatatacgaggacatcacctgaattgggccgtcaggtaggtgtgtatgccggtgtcatgtatcaggaatacccgctattcgcggctgaagcgggagtgaaaggacggcatatcgggctccccggcgggatttcatccattgctaaccgtgtctcctatttttgtgattttcaagggccgagcatttcggtcgatacgatgtgttcgggttctctgacttcattgtacatggcgtgccgggatctgcgggatcatcggattcgcgcggcgcttgccggcggagtgaatctcaccgttcatcctaacaagtacttcatgctgagccaggggcagttcatctcatctaaaggacactgcgggagtttcggcgccgggggtgacggctatattccggcagaaggggtcggggtgctgcttcttaaacgtttagaagacgccgtacaagacggagatcggatttacggcgtcattaagggagctgccattaatcacggcggaagagcgagcggttacaccgtaccgaaccccaaggcgcagagcgaagttatttctcaagctttacaggaggcgggggtatctccgggccagatcagctatgtggaagcgcacgggacagggacaaaattaggcgatccgattgaaatccgggctttaaccgatgcattcggtgatgttcctgaaacatgtctcatcgggtctgtcaaatcaaatatcggacatggggaatcggcagcaggcatcgccgctgtcacaaaagtgctgctgcagatgaagcacaaacaaatcgccccatctttgcatgcggatgttttaaatccgaatatccaatttgacgaagggccgttttccgtctgccgggaattaacagattggaaacggattgccgcagacggagaagaacagccgctcagggcggggatcagcagctttggtgcgggcggttctaacgcgcatatcattattgaagaatatgaggctcctgtcaaacaagcaatcagcagccaagagccggctgtcattctgctgtctgcgaaaaacggggagcgtctgacagaatatgcggagcgccttcttgcttttcttcaaaagaagcatacggatcagccggacttatttgatgtcgcatatactttacaagcggggcgggaagcgatggatgagcggctggctctcattgcggactcccttaaggagctggaggacaagctcagatcgtacttggaaaatgaaaatgcaccgcatctttacagggggcgggcgaagcgaaatcatgagacagtggctgtgtttgaatctgatgaagatttgcaggaagccatggtcaaatggctgaaaaagagaaagtacggtcatttgctgaacatgtgggtgcagggagtcgatgtggactggaacttgttatattcgggacgaaaaccccggagaatcagccttcccgcctatccgtttgcaaaggtcagatgctggattcaagatgaagccgaggcggtttcaaaaagggatgacggcaaaacggtgatccatccgctgcttcatgaaaacacatccgatctgtgggagctgaaattcacatccgtttttaccggacgggaattctttttcactgatcacacagtcaatggggagaaggtgctcccgggagccgccgtgatcgaaatggccagggcggccgttgagcgtgccgcatgcgctgtgccggacggacgtaaaggactgtatttgaaagatctcatatggatgaggcctgtcgttcataaggggacggatgtagaagtccatatcagccttatccttaaggaaaatgaagacattgaatttacgatttacagcctatcggaagaacccgggggagaacggattttatacagtaaaggcaccgcggtatcaggagagatagcagaggttccgtcagttcacttagagggctggctgtccggctgcggccaatcggttatgacgtctgatgaggtttatcaggctttccggcatgcgggtatgatatacgggccgagccatcaaggaattgatcagctgatgatcggagagaggggcgctgcagcccggctgtcgctgccggaatcggcagacagtaccgccgatcagtttgtcatccacccgagtcttctagatgccgcgtttcaggcgtcactgggtgccggttcagatactgccggagacactccgatgctgccgttttccctgaggcaggcagaaatatttcagccgactcagaaaacgatgtgggcgcttgtccgcaaacagagcgatcggtcagataacggagcgctgacgctggatattgatttatgtgatgaaaacggcgctgtttgtatgagattgacaggatttgtctgtcgggcggtccggcagacaaaccaaaccgaaagcaaacggcaggaagttcagacggcgctgcttgcccctgtttgggacaaaactttcttttctctggaagaaaatcgagcggttgatcaggaacaattgctgatcatcggaaagccgggaaataccataaaggctgcggcaaaaatgtggccccgcgcccatctggcggagacgccggatcattcaagcgagcaaacattacgtaaattgacagccgggtatcaagatatccgccatttcttatggattgcgccggatcgtttcgcacccgcatccgtcagtcaggaaatgcttgatgagcaggagaatggggtgattcaatgtttccgtttcatcaaagcgctgctgtcactcgggtatggaaatcgaaacatcagctttacggcggtcacccggcagacacagtccgtgtatccgggtgatctgccgcagcctgagcatgcaggtgtacacggtttgatcggttcattggcaaaagaatatccgaactgggatatcaggctgattgatgcagaagaagacagtgattcgtctgaaatgaaagacatctggcgcctccctccagatccggacggaaatgctgccgcgtaccgtaacggagcttggcacaagcaaaaaacagtccgggtgctgacaagttccgctccgcgtatgtcgtacagagaaggcggcgtttatgctgtcatcggcggagcgggcggcatcggagaagcatggagcaaatacatgatcacccgttacaaggcacggataatatggatcggcaggcggccgaaggatcaggagattcagagcaaaatagacaggctggcgctatcaggccccgcgccgcattatatacaggctgatgctcaagatgccgcagcgcttaaggctgccgtccgttccgtaagagagcaatacggcaatataacgggagtcatccattccgcgataacgcttgccgacaaaagtatggcgaatatggatgaagcttctttcagaaacgctttttcagctaaggcaaatacgagcgtccgaatgatcgaagcttttaagggagaaccgcttgattttgtgctgtttttctcatccgttaattctttcacaaaaaatgccgggcaaagcaactatgcggcagggtgtacatttcaagacgcctttgcccgccatatcgcttccttgcttgattgtgaagtgaaagtcatgaattggggatattggggcagtctgggcgttgtatcagacccgtcttacagaaaacggatggaggcgtcagggatcggttctattgaacccgatgaagcaatggaggcgctggaagtcttactatcagaaccgttcagtcaagcggcattcatcaaagctgctccgcacggcttagccgcactgacggatcaagatgcaatatcggttatatccggcccgaagccttcatttatggaaagcgtcaagcggcaaaatccggatcggaatgaacggcttgagactttaaaacaagaaatggagttgcgcatatgaacagccttctttgcaaactgctcttttaccaattacagtcaatcgggtttttcagcgagcctgtcactacacctgcagcatccatgcggagcgccggcgtgatcggcacatacggcagatggctggaagaaagcctgaatctattaaaagaaaacggatatatcgcgtatgacggatacacgatcaccctcctcacggatcagcgtccggacagccgcacagtctggaatgagtggaatgcccataaacgcctgcttcccaatggggagcttgcgcaagctgaattggctgaggcgacgataaaagcgatgccttccattttaaaaggggaacgtccggctacggatatcgtatttcccgattcgtcaatgcggctcgttgaaggtgtttataagcataatcctgtcgcggattattttaatgaagtgttagcagatgccgcggccgcttacctgaaagcctatcttacagaacaccccgatgcccgcatcaggctgatagaagtaggggccgggacgggcggaacgagcgccatgctgtttacaaaactgcaaccatttgcaaaacagattgcggaatattgttatacggacgtttctaaagcttttttaatgcatgccgaacaggaatacggacctgatgtgccgtatttgacaacagccttgtttaatgcggaggagccttgcgaatcacaaaatatcaaaacgggtgtttacgatattgtcatcgccgccaatgtgcttcacgccacaaaaaatatcggtttgacactgcgccgtctgaaagcgcttctgaaatacaacggaatgattctgataaacgaaatcagcgatcgttctgtttttacccatttaaccttcgggctgcttgacggctggtggtcctatgaggatgctgagcttcggattccgggaagtcccggcttatatccaaaatcgtgggagcgtgtgctgcattcggaaggatacagagcggtttgtttccctgctgaaacggctcatgatttaggtcagcagattatcgcagctgagagtgacggactcgtccggatgcaagggatcagagacggcagaaagccatacgccgccccggccgaagttttccgaaagcccgcacagcctgtttcccgcagccgcgcgccagaggagcatcaagctgttaaggctgatggggaatcggtcgtttcccatgtccgctcagtcatcaaaacaagtattgccgatgtattaaaaatgaaagaagaggatattcaggaagaactgaatttctctgaatacggcattgattccattttggccgtcaatgtgattaacgagattaataagcgtttgaatcttacactgcagacaacgattttatttgattactatcatgtgaaactgctgaccggttatatctcggaagaatacgaaaccatcatagcctcatctctggagaccgaaagagcgaaaatccgcccggcgcttcaggaagaacggcctgctgaaaaacctctgcagacggaaagaaaggaaaacggttatcagaaaccgaaacaagaacgtatgccgccttctttcgcaaagtccgatgactcgggaatgttccgggttgtgattgaccgtccgggcggcattgaagatctgacgattgcccgcagtgaagtgcccgagacaaaagatgacgaagttcaaatagccgtccgcgccttttctttaaacttcggagacttgctttgtgtcagagggctgtacccgacgatgccgccttatccgttcactccgggatttgaagcaagcggcgtcgtgatcaagacagggaggcatgtaacatccgtcattccaggtgatgaagtgattgtcggcatgggagaggaatttggatctcaggcgaatctcatcacatgtaaagaacatcaagtctatcataaaccggcccggctgacctttgaagaagcatgcgctcttcccaccgtggcggtgacaatgatagacgccttccggaaagccggacttaaaaaaggcgaaaaaatattaattcagaccgcgacgggaggaacggggctgatcgcggtgcaaatggcccggcatatcggtgcggaaatatatgccacggccggatcacagaaaaaaattgagtatttgcattcgctcggggtccacaataccatttgctatttagaagaagattttgaaacggaaatcatgcgaatgaccggcggccgtggggtggatgttgtcattaataccctggccggtgatgccatgcaaaaaggaatgaattgcctggcgccgggcggaagatatatcgaaattgccatgactgcgctgaaatccgctaaatcagtcgacttgtccgtccttcataacaatcaatcgtttcacagcgtggatttgcggaagctgtcccttcaaaatccggatcaggtcaaggattatcaattggaactgcagcggctggcggaagagggagtcattcagcctgtcatctcaaaaatcttttcctttgaagacataaaagaagcgtatcactgtctggatgaccgcggaaatatcggaaaaatcgtcatcagcgtttctgagccgtatcaaatgacgtacccccccgaacaaaaggatccggccgatacagtaaaatcagcagctgtgttacctgaaaaagaaccgatcgcgattatcgggatgagcgggcggtttgctgaatcggagaatctccaagagttttgggaacacttagccgccggacgggatctgattaaaaaagcagacagatgggatgtctctgacagccaatgccagtatggcagttttatagaggacattgaatgttttgaccccgttttctttcatatatcgggacgtgaagcgacctatatggacccgcagcagcggctgtttttggaagaatcatggaaagcgcttgaagatgcgggatatgcgggagactcggtaagaggccgggaatgcggcgtgtatgccggctcctgcggcggagattaccaggccatttttaaacagcaggggcccgcgcaggctttttggggcaatcataattccgtcactccggcaaggatcgcctatcaccttaatttacaaggtccggcgatcactgttgatacggcatgttccagttcgctgacagccattcatttggcatgtcaggggctctggacgaaagaaacggaaatggcggtggcgggcggggttttcattcaatccactcccgctttttatcagtcgtcaaataaggcgaatatgctgtcaccgaccggacgctgccatacgtttgatcaaagcgcggacgggttcgttccgggggaaggcgtgggagcggtggtgctgaaacgtcttagcgacgccgttagtgacggagatcatgtgtacggcgtcataaaaggctctgcaatgaatcaggacggcgctacaaacggaatcaccgctccaagcgcgctttctcaagaacgattggaacggcatgtctatgacacttttcacattgatccggaaaccattcaaatggtggaagctcacggaacgggcactgcactgggcgacccgatcgaattcggcgccttaacgcgcgctttccgccgctatacggataaaaaaggatattgcgccatcggctctgtaaaaaccaatctcggacatgccgctgcggccgcggggatggccggactgtttaaaatcctgctttcgctgaagcaccggcagattccggcttccctgcattttcatcaagccaatcagcatattcaatttgcggacagcccgttttttgtgaatgaaaagttgataccatgggaacggaatccggatgcaccgcgcagagccgccatcagttcattcggattcagcggaacaaatgcccatcttgtgattgaagaggcgccgcaaaccgtgcgccggtcaccggcaaaaccggcctgcctcattcctttatctgcgcggacggagcgtcagctggaaattcaggcagaacgcctgctggattcactcagcaagaacaaagacagcgatctgggaaatataagttatacgctcctgctcggcagaaagcatttacatcaccggtttgcctgtatcgtaagcagtgcggacgaactgaagcgggtattatcggagtggcttgtaaaaagagagcttccgggtgtgtttgtgtccaatttgaaggatcagaagccggcagaagaagccggaatgaaaacattcggaatggaatgcattgaacagtgccgctcggcggcttcgcccgcacagtacagagaaagcctggcacatatcgctgaccttttttgcagagggtatgatcttccttttacacggctttttgacggagggcaatattataaaacgccgcttcctgcctacccgtttttaaaagaaaggtattgggcggctgatgtaaacagttctttaccaggtcaagccatgaaaaagtctgaaacgcaaaccgttctcccgtcttcgccccagcctgaacatgaagggctgatttctctgactcctttaactgagatcgaaatgagagcgtttgaaccggagatattgcaaaaaccgatcgtgttacagcctttggatggtactgtttctgtccggcagccagaaaaagccgttttcgaagacaatagaacattgcttgaagaattgaggataagcctggcagatattttatttttgtcaccggaagatattgatgctgatgagcctttcatcgacatggggcttgactccattatcggggttgaatggatacaaacagtaaataaaacgcaccacactgagattactgccaataaggtgtatgaacacccgacgcttaaggagcttgcggaatatatagcggggcaaataaagaaacccgagtatgctgaagcggaggaaacagcggtacgtccgcaaatcccggaagcagaaactccccttgccggcatctctgacggcactttgcgcaaagagctcaaagaaagccttgcggacatcctgtttctgaagccggaagatattgatgagcatgaggcattcattgatatggggctggattctattatcggtgtggaatgggttcagtccattaataaagcctatcaagcgtctattacggcaaatctggtctatgaatatccgacaatcgcaacattagccgggtatctgaccggttctgtccaaaaagacactgaggaagtacatggggaacatacgaaacaaaacgatatatcagaagaggcagatgatcaagaaccgcccgagctgatctgtcttaacccgggtggaaagggaagaccgattttctggtttcattccgcgctgggggcagtggagctgtaccagcccgttgccgaacggaccgggcgtcctttttacggaattcaggcaagagggtggatgacagaccgggaaccgatccgcggcattaaaaacatggccgaatattacgttaagctcatacgtaccgtgcagccccggggtccttacgatgtaggcggctattcattagggggcatgctcgcttatgaagtcacccggcaattgcagctggctggagaaaccgttgagtcaatcgtcatgctcgactcctttgacgcggcgggtgcgcgggaaataaacatttctgatgaattatttgataaaaatatgatgctgcagacggtgaacatggctttatttgcaccgatctatcaacatccggaacgcatatctgaaaccttgattcatcgtgatgaactgaatgccgatcttcatgaagacatatttttagagcaattaatcgcaaaagccaaacagcgggggttaacgaagacggacgcgttggtgaaaaatctgatcaggcagaatataaatgttcaggacgcttacgaaatcactgattacgaactcctgccgcttccggatccgaacggggtgacatgctattatttccgaaataaaaacggtattttcttgggtgagcttgatccgtattttacaatcagggccgatattttatctgctgatttcgtcaactactggagccagtgggaagagcatatgacaaacatcgccatcatggatgtggcggtatccaaccatatgacgttattggctgaagacagcgcagccgaaacgatttctgaattttgcggcgttttatattcggcagacggaatgacagaacacagcttcctgcagctgcaggaaaagatactgaatgtgcatggtgagatgctgaagcagcccgccaaaacaagaccgtaaattcacatatccgcccgccgggtttactcgtaagcttcggcgggtcatttcaaatcttgatcacatcttggaggaatgaaaatgaccagtttaacaaaaatcagacagcagcagccgtacaagtggtaccaaacgatgagagaaacctctcccgttcattacaatgaaaaggaagattgctgggaaatcttcacctatgatgaagtgaaacgggtgatttctgactacagtcatttttcttccgatcataaatacttaagtgcggacaaacaggaaaaaatgattcggcatattaacaaagacagccttttgaaaatggacccgcctgaacacaccgtcttcagaaaattggtcaatcagccattcatgccgaaatcggttgagactcttgcaccgcgtatagccgctatcgctgatgacctgcttcaggccgtccgttcaaaaggcaggatggacattattgaagattacgcatttccgcttccgattatcgtgatcgcagagcttctaggatttcctccgaaagacagagatatctttaaaagctgggtcgaccaaagccagaatgtaaaagatgaaaagaaaatgaatgaagtgcaaaagcagatgatcggatacttcatgcagtttattttacagcggagaaaacagccgcaaaatgatttaatcagccatttaatttcagctgatttagacggagagccgctgtcagacaagcaattaatcggtttttgcggcttgttgattgtcgcggggcacgtaacgacggaaaatgtgatcggaaactcatttctcagtctcaaggagttcccgcacattctgccccggctgcttgaaaataaggcgctccttcctgactttattgaggaagtcatccgcctcagaccttccattcagcgggtaacccgctacaccgcggttgagagcgagattggcggaaaaacgattccggccggagaaaaagtgtatgcgtggattggatcggcaaacagagatgaaaagaagtttgaaaatcccgatcagattgacttgggacgaaagccgaatcagcatctgtcattcggtcagggcagccattattgtttaggagcgccgctggcccggcttgaagcgaaaatcgcgctttcccacttttttgaacagatgcccgcatggcgttttactaaggatcaagagccgaatctggttccgagccctgtatttcacggcgttgacaggctgcttgttgaattttgaacggaaaaataaaagaggcttccgcaggaagcctctttactctgggggcttggagaaatgaatgtaggaatcgaagcaatgaatgtgtttggcggaaccgcgtatgtagacgtcatggagcttgcggaacatcggaacttggataaaaaaaggtttgagaacctgctgatgaaagaaaaagtggtggcgcttccgtttgaagatccgattacgttcgccgtaaatgccgcaaaaccgattatcgactctctgtcagaagaggaacggaatcagattgaaatggtcatcatctgtacggaatccgggattgattttggcaaatccatcagtacatacgtccatgattatttgcagctgaagcggaattgccggttatttgaggtgaaacaggcttgctattctttaacggccgggtttcaaatgggtgtgaatttcatcttatcgcaaacatcgccgggagcgaaagcgctcatcatcggaacggatatttcccgctttttagttgctgatggcggtgacgcgttgacggaggaatggtcctatgccgaaccgagtgcgggggccggagctgtggcgcttttagtcagcagcacccctcatgtctttttgcttgatcaaggcgcaagcgggtattacgggtatgaagtcatggatacctgccgtccgattccggatagtgaagcgggggatgctgatctgtcgctcatgtcttatttggactgctgtgaaaaatcatttcaggaatacggaaagcgtgtgagcggggcggattataagaatacatttcaatacctttcttttcatactccgtttggcggaatggtaaaaggagcgcatcggacgatgatgagaaaattggcaaaggctaagccgcaagacattgaagcggattttcagcaacgcgtgctgcctgggattcaatactgtcagcgcgtcggcaacatcatgggggccaccgtatttttatctcttgccagcacgattgataacggctcttttgaaacgccgaaacgcgtcggctgtttttcatacggttcgggctgctgctctgaattttacagcggtgtcgttatgccgcaaagccgtacgcggcagaatcaatttcagatcagccggcatttggatgaacgcgtccgtttatcgatggctgattatgaccggctgctccaagacagcggcatcgtaaaattcggcacaagaaatgccgcgcccgcagcagacatcccgaatgcgcatcaaggaaaaacacgattggtgctgactgaaataaaagagtttcacagaaagtatgaatggacgacttaatatcagaaacactcagagccggcaaggcttgagtatttttaaagaaacggagaataaacatgaatccaatgattgatgtacaggaaacagaaccgggcattgtgcaggtcacaatgcaggatacggccgggaaaaacgggctgtcagaagagtttgtcagagagctgcaccgggtattccaggacatcaatgcccatccgtcctataaaaccgtccttctgacgggttacggaaattatttctgcacgggaggaacgcaggaggggcttttgaccattcagagcggaaagctccaatttacagatttaaagcttcacagtcttttattggattgcaggattcccgtgatttccgtcatgcaggggcatgcgatcggagccggctttacgatcggtctgagctcggatttcgtgattttaagcagagagagtttttattcttgtaattatatgaagtacggatttacaccgggaatgggcgcgacgtatattgtgcctgaaaaactgggaattgtcctcggggaagaaatgctgtttacggccgcgaatttcagcggcgccgctctggaaaaacggggagttccgtttgaagtgctgccgaaaaaagacgcccttcaaagaggccgcgaattagcccggctgctggcggataaaccgagagcctcactggttgcgctgaaaaccaatgtgaccgcacggatcaaaagagagctgacaaaagcggttgaggaagaggtgaacatgcacgaagccacattccatcttcctgaagtaaaagagagaatcagccgcttatacggcagttaaacagaatgaaaaaagcatgggaagccccatgctttatcactggtccgtcttttgcagaacggagcttgcgaattgttctttaatttcggcgctccgggctgcggtttctgcgatgcagtgcatgatggcttcttcaaagcggcgctcttctaatgcgcgaaggcctgcttcagtcgtgccgcccgggcttgtgatttccttgcgcaggcgttcaggccgtttgctgcttgttctgagcatttccgtcgccccggccatggtttgtaaaatcagctcttttgccgtttcttccggcaggccggcttgaagggcggccttttccattgcttcgacataccggtacacataggcgggaccgcttccggcaatggctgtgacggcgtcaaggtgtttttcttcaaagcgcgtcgcttctccgattgtttccagaagctcttttgccgtccggatttcagcttcactcgcctcggagcttgcggaaaaaccggtcgccgattgctgaatggccgcggatgtattcggcatcgcccggatgatggtgagctttctgccgaaatattgctgaatcgtgtgaatcgtcagccctgcgatgacagaaatcacaagctgatctttcacgtattcgcgaatgttctcaatgctttctgccgcatctttcggtttaaaggcgagaacgataatgtcggtattgctgaaaaattcttctttatcccggcacggtttcactccgtacgttttttggagctctttcagccggctgtcatttgaccggtttgtcatatatatatgtccgggggctgtcattccgctttgcagcagtccgttcaccattgcttccgccattgatccggccccgataaaaccgattttcttcatataaatcctccttcttttcaaaacacaaaaaaaccttcccgtcaaaaaggacgaaaaggtttcgcggtaccaccttacattagcacgaatcagccgtgctcagctcaaatcccgtaacgaggggatacgtttaggttttcctaaccgctctgagggcaggttctgtaaacaagagggccgcaatgtctttcagccggggacattgctctctgctgccgttgtttatatactagttcctcgtcatcgcgttccgtgttttctagtttgttgttcattatgctatgcgcaatagcgggatgtcaatctttttttccgatatgcggcaataatgacacagtgaaaagaaaacgctaaaatatgattattcaggaatgaaaagaacgaaggagcgtaaacatggcagcgagaaagatcatcccgatacgtgtgccgactccgtttgcagtcggcgacgttatcgtttatttagtaaaagatgaagccttaacccttattgattgcggcccgaatacaaaggaagcggctgaatcgctctcattgcagcttaaggaacacggggtttctgcggcggatatagaacaggtggtgctcactcatcatcacgcagatcattcaggtctgctgcaccttttttctgaggatacggaagtgatcgggcatccgctgaatgacaggtacattactcaggatcagtcgtatatcgcccggcaggaggacttttttctgtcgcttatgactgaaatggacgttcccctgatgcctgaagacatacataaaacagttaagctgtcatacttattttctgcaaaccgtccgttaacgaaaacagtgagggaaggcggaaaaattgacgggcttaacggctggacggtgctcgaaatcccgggtcatgccgcttctcacattgcgctctaccatgaaaaaagcggtgaaatgttcagcggcgatctgcttttgtccaacagctccaccaatccgattctggaagctccggaaaaggggggcgtgcgcgcggccccgatgctcgactacttgaactcaatgaagcggctgtatgacgtaaacccgtcctttttatatccgggacacggcgatctgctgacagacgtaaagcctgcttttgacaggcggcttgaaaaacagagaaaccggtcggaatatgtgctgcgcctgttgtcagaggaaacgctgacggctttccaggtatgccggcggctgtttccggctgtttatgaaaatgaattgtttttaacgatgtcagaaacgatcggccatcttgacgtgctggccgccgaagggaaggttgtatcctttcagtcggggaacactctgaagtttaaagctgtgaaggggtgaaggaaatgggcagattaacggataagcggatttggatcaccggagcatccggcggactcggagaacggcttgcatattcctgcacggcagaaggggctcatgtttttttatccgccaggcgggaggaccgcttgcaggaagtgaaaaagacgattaccgcgcgcggcggacagtgtgatgtcatcccgtttgacgtccggcatgcagaagaggctgaaaacgtaaggcgtttgatcggtcatgtagacgtattaatcaacaacgccggcttcggcatttttgaaacggccgctgattcatctttggatgatatgaaggcaatgtttgaagtcaacgtcttcggattaatcgcctgtacgaaggcctgtcttcctgtgatgcttcatgcgaaaagcggccatattatcaatatcgcctcacaggccggcaaattggcgacgccgaaatcaagcctttattccgcaacgaaacacgccgtgttagggtattccaacgcgctgcggcttgagctggccggtacgggtgtagccgtgacaacggttaatcccggtccgatcaaaacagacttctttacaattgcagataaagagggcggttatgtgaaaagcgtcggcagatggatgcttgatgccgaccatgtggcagagcgcattacatccgtgattctgacggataaacgggaaatgaatcttccgcgatggatgagcctcgggacgaagctgtatcagcttttcccatcgtttacagaaaaactggccggccgcgcattaaagaaaaagtaacaagggggaaaaaggaatgtccgaccgtgatatacacaaggcattgatggcagatcctttcgtcaggcaaatggcggaggcgcgtgaagtattttggatcaacccgcataaaaccgatgatccagtaaagcatggtgctgaatggaaaaaggagattgccgaagcggaagaaaggctgcgccggtttgcgccttatatcgcgtcggcttttccggagacggaagcggcgggaggcctcattgagtctccgcttgtcttaatcaatgaaatgaaaaagcgtctggaacacagcgccgctcaggctttccctgggcgtttgcttttgaaatgcgacgacgaacttccgatttccggttccattaaagcgcgcggcgggatttacgaagtgctgaagcatgccgaagatctcgcggtaaaagcgggaatgctctcagcagacgacgattacagtatattgactgaagaacggtttaccgcttttttctcaaaatactctatagccgtcggttctacgggcaatttaggtctgagtatcggcataatcggcgcgaagctcggcttttgtgtgaccgttcatatgtccagtgacgcaaagcagtggaaaaaggagctgctccgggaaaagggggttcgcgtcatcgaatatgaagcagactacagtctggctgtcaaagaggggcgcatgcaggcgaagcaggacccttattgttattttattgatgatgagcattcccgggatctgtttttggggtatgccgttgcgggaagccgtgtgaaaaagcagctcgatcaaatgaacataaagcctgatgcagatgaaccgcttttcgtttatttgccgtgcggggtcggaggaggcccgggcggcgtcgcgcttgcgctaaagctgatctatggcgagcatgtccatatttttttcggtgagccgacgcattcaccgtgtatgctgttaggactgttttccggcttgcatgacggaatcagcgtgcaggatatcggtcttgataatcaaacggccgccgacggactcgcggtgggaaggccgtccggactggccggccctctgatggaacctatactcagcggctgttataccgccgatgacggcacgcttttttcgctgctttatcaattaagggcggccgagaataagagccttgaaccctctgcactcgccggactggccggagccgtcaaggtcgttcagaccgaagccggaaaccgttatataaaagagcgggggcttgagatggaaaatgccgtgcaccttgtgtggagcaccggcggaagcatggttccggaggaggaaatggaagagtacagccggatcggttcctcatttttgaaaaaaatgggcagacagtgaagcggttttccgttacaatctttgtaagcgtttgttttttatcggaaagccatacagagagattggtgtgaattgtgaaaagtaaagaattgaatttacatacattgtatacgcagcacagccgcgagtcgtgggccggattcggcggccatctttccattgccgtttcagaggaagaagccaaggccgtagaggggctgaatgactacctgtcggtggaagaagtagaaacgatttacattccgcttgtgcgcctgctccatcttcatgtcacgtctgccgcaagacggaatcagcatgtcaatgtgtttctgaagcatccgcattcagcgaaaatcccgtttatcatcggaatcgcgggcagcgtcgccgtcggcaaaagcacgacggcgagaattttgcaaaagcttctttcccgtctgccggacaggccgaaggtgagcctggtgacaaccgacggttttttgtatccgacagtggaattaaaaaggaaaaaccttctgtccagaaagggattcccggaaagctacgacgtgaaagcgctgcttgaatttctgaacgatataaagtcagggaaagagagagtggaggcgcccgtatattcccatcttacctatgacagggaagagggcgccgtcgaggttgtcgaaggtgcggatatcgttattatcgaaggaatcaatgtcctgcagtcgccgacattagaggacgacagggaagatccgcggatttttgtatccgatttctttgatttttcgatctatgtggatgccgaagaaagccggattttcacgtggtatttggaacgtttccgcctcttaagagaaaccgcttttcaggatccggcttcttattttcataaatttaaggatttgtctgatgcagaagcggataccatggccgcctccatttgggagagcgtcaaccggccgaatctgtatgaaaatatcctgccgacaaaattcagatcggatttgattttgagaaaaggtgacggccataaagttgaagaggtgctggtaaggcgggtgtgatgtgaggaggaagcggatattatgatacatcatattgagttgtatgtatctgacttgaaagcctccgcccggttttggggatggtttttaggtgagctcggttatagggaatttcaaaattgggactccggcatcagctggaaaaacgcaggattttatgttgtgcttgtacagacagaggagcgttttttaacaccggagtaccacagatgccgggtcgggctgaaccatctggcttttcatgctgcatcaagagagcaggttgacgagatgacagaaaagctgcttgccagaggatgccccgtgctttacagggaccgccatccatatgcaggcggaagcacgcattacgccgtatacacggaggatccggatcggataaaagtggagctcgttgctcctgcttctgaatgaactataacttttcgtttttttcttcgcgcagcgcgtcgagtttcttttcgattctgtccaattgtatgcggcgctgcttcaagcttctgaatacgtatatcacggcaaacaggaaaaccgcggctgcaataaatgaaatcaattgaaaaatgacatcaccgatgttcatcttttttacctccgtgtgcggcgggcttcttcagcccgccgttttttcattttgaccgatgtgaagacatgggggatgaatcatttctctcctagccttgtttttttctgagaatgaatagtttctgcatgtggcttatgaccacttttgcggccgcatatcccggaatggccagcagcatcccggcaattcctgagaatttgccggcggcaagcagaagaaaaataatggtcagcgggtgaatgtccagcttccgtcccataatttgcggggaaatcagctggctttcaagctgctggacaatgacgacgaccgtaatcaccagcaccgcctcggtcggtgaatcgaacaatccgacaatgactccgggaaatgtgccgatccaaggcccgataaacggaatcaggtttgtcaccatggcgaacgcgcccagaacgagcggataatcgagcccgattataaaatagccgattgtgacgagtacgccgacacaaaaactgacgagcagctgtccttgtatgtatgaactgagagcttcatccatgtcctgaaggatttgttttccttctttttgatgtttttccggaagaagccgcagcagacgccggggggctttgtttccttcttttaacatgtaatacagcgcaaacggaataatggcggcggtgatggcggcattggcagccgtaccggccaggctgctgagagaatcagcgattgaaccggaataatttgcggctttgtctgctaattttttaaaggaatccccatgctgaagccgggagaaccatttgctgtcctgaagatgcccgatccaattttcagcttttgcggaaagctccggaatatgatctgtgaaggctgtaaactgtttttgaacggcagggcccgccgtataaaggaagaggacaaaaaggccggctgttcccgcataaatcgctaaaatcgcgattccttcgggcagctttaatttcgcatgcagcagtctgacgagcgggcggcacaaatagtagaggacgcccgataatacaataggcggaaataaggttttaaccgtaatcaccacaggctggaacaaaaagtctattaatgttccgagataaatgatgagaaataacagaagaacggcataaccgatcctgaaataaggcccgataggcatatcctgcaccacgcaatctttaagggtttactctcggacgtttcccttatcgcccggtgcataaacgtccgtgtcaggaaaactgcccctgattggtgacgtaatcgtagataatatcttctacatgggcatgaagatcctcatcgggttcttcattccttctttcttctaaagctttttttaaactctgtttttcataggggctcagcggatctgtcgacacattccgtccatactggcggagggcttgtcccagcattttttctataaattgatccatcgtatattctcctattcttgtcattcatctttattctactaaatatcatgtgatcctcccactcttctatcatattttctgtcaggccggggtaggatttttattccaattcagctgagagaatacgatgaaacggcagcgttaacgcatcttcatcgtttatgatttttaaacgcttttcgtcatgcctcacttgttttacccatccccaaaagcggcggggaccgtgtgctgaagcgtaggtgaccgagatggccctgtcttcttcaatcgacgccgcaatgatgcggttcatgtcgttcagttgctcttcgctcagttccggaggccggaattcccgttcttttcgtttttttgcaagcagctgctcccgatgttcgggcagcatcatccggcttgattcccacatgacattatacccgggtgttaatttgttcggattcatgtatatcacctcaaattatttgtaatgcccgccgattttttcagcccggtgaaaggcttggccggcctctgtcagtgaagcggcatggaggagtgacgcagggccgtaccgctcatgaatatcatccaatactttgccgagactgatctttttttcctgggcatcgaacaggctcagctgaacataatcacaaggctccagctgggaaagggagacgccggcgctgcggacgggctcaccgttccaatgctctttgaagagcttgaccgccgctttaaaaatatccattccgaaattagtcggagagatcagctttctctgtctgtgaaaacctgaagggaattcaaaatcagcgcctctgatgctgaccgaaaccgtatggccgatgtattgtttgaaacgggcgcggcgggccacttcttcgcttaactccagcagcacgactttaatatcctcaaagcggctgtagtctctcgggagggtcatgttatggccgatcgctttttgccggctgtgcgtgttgacggtgaccggagagggatcgatgccgcgggctgtccgctgaagcaattcgccgttaatgccccagcgttttttcagcagttcggctgggtgcccggcaagcccgccgattgtgctgatgcccatccgtcttaaatgatgctccatccgttttccgatgccgaataattttccgaccggcagcggccacagatcctgcctgatatttgacatatccaatctgtggatgccggatgcgttttttttggcaaaatggtcgcaagccattttcgcgagcgccttattcggcccgatgccgacacgggcataaattccgaattcacgcataatcgcttgctgaatgctttcggcaattgtaaaaggatcaccgaacagccgcctgcttccggtcacgtcgagaaactgctcatcgatggagtagggttctacaagatcggtataccgttcaaacagttcggtaatcatgacggatacatcaatataccgctgcatccgcggacggacaataacggcgtcgggacatttggcctgcgcttcccacagccgttcggcattttttacgccgtatcgtttggcgagcggacaagccgcaagcacgacgccgctgcgtctttcgggatctcccgagacaatcacgggccggcttttgaaatgaggcgcttccgctttttccacagacgcataaaacgattgcatatctacaagaagaatatcagccataaaaaaacctccgggaacgtttgttctgtttttcattgtacccgaacaatgatcacgtttatactggtaaatcattccccggctggaagacgtgctgattcgtttgcttgaaaagaaatcatttacaattgcaaacaacccacatataattttttatattccaatgagaagagctgacattcattttgccggacgaaaaggagagtcaatcgataatggatattcgaacaattacctctgaagactatgaaatggttacgtctgttttgaatgaatggtggggcggcaggcagatgaaagacaaactgccgcgcttgttttttgaacattttcaggacacaagctttatcacgtacgggccggagggaatgaccggttttttaatcggttttcagtcacaatcagaccctgagacagcctacattcatttttcgggtgtgcatccggatttcagaaaaatgcaaattggaaaacagctctacgaccgatttatggagaccgtgaagaaaaggggctgcacaaaagtcaattgcgtgacggcgcctgtcaataaagtatcaatcgcttatcatacaaaattaggctttgaagttgaaaaaggaaccaaaaccgtaaacggaatccctgtttttgcgaattatgacggtccgggagaagaccggattctgtttgtgaaatacatatgagggggatgaatatgggttttttagctgacacgcccaaaccgccctattatgcggtcattttttcatcaataaagggaaaatatgatgaggaatatgaacatacggcagagcgcatgatgaatttggcaggcggacagccgggctttttaggcgcggaaagcgttcgggaggaaaacggctgcggcatcacggtttcctactgggacagcctggaggcgattaaaaggtggaaagatcatactgaccaccaggcggcaaaacaaaaaggaaaaaccgcctggtatgaagcgtacgcggtccgcattacgaagacggagtcacagcggatgtttgcgtcaaaaggggcggaagattgattacatttttacagcatacacaagaacagaccgcgcgggaaattgcggcggttcagcgctgctcttatcaaaaagaagccgagctgatcggctttttcggcattcccgccctgcatgaaacacccgatgatatacagcggtcacgggagacgtttgccggtttcaaggaaaaagatcagcttgcaggcgtcatttcgtatgaaaaaaagggatatgaccttgtcatatgcaggctgacggtgcacccttcaggctttcggaaaggaatcggacgggcgcttattcaatttgtgatagacgagaaccgggacgcccaaaaaatagaggcggctaccgccagccaaaacgttccggcagtctctctctatgtaaaaaccgggttcacagaagccggacagatagagacggcggaagggctgaccctctcgttttttcatctttatccgaagaggaaagcggaagttgttccgtacaagccggaatggaaagaaatgtttgaaagagagaaggcggacttgatccgaatcttcggctcagcacttcattctgtcagccacatcggcagcacctccatcccgggcatggccggcaaacccgtcatcgatatactggcggaggtcaaagatatttcggacgctgaccgattcagtccgcagctggaagcactcggctatgaggcgaaaggggaaaacgggatagagggccggcgtttctttcaaaaaggcggcagcaagcgcacacaccacgttcacatatacgaaacaggccatccggacgtgaagcgtcatctgctgttccgggattacctcaccgcaaagcctgaaaaagcggctcaatacatggaactgaaacggcacctcgctgagacatacccatacgatatggcaaagtatagtgaagggaaaaatgactggatcaaggcggctgaacaagaggcaaaggactgggagagcgggctgctgtaaagaaagcagaaacaatgcatacagcggctcggtatgctacaatggcgaaaatgaaaaacggaggatcatctatgcaaatacatgtgacggatgcggcgaaacacacacttcagcaggcgatggacgccaacccggggaaaaaagcgcagctccgctatgacgcagaaggctgcgggtgcgcggtgagcggtgtgccggccatctggctggcggacgaattaacgggacaatgcgaagccattgaaaccaacggacttccgctttacatccagacctcacaaaaagtgttttttgacgaggaaatgacaatcgattacaatgaaaaggcaaaaacgctcgtcttaaaaagcccggcagagatgctgagcccgagaatgagcatattagtaaagcagggagaaacggaaagtgaatcaaaagctgaaagccattaaacagacggcacagcataaaacgtgggtatcctttctgaacaacaaccacccgtacagtctgctgcactggtctattggaggcgctgaatccgttcagaaggatgtctggctgcttcaggatgagatgaccttcaaagcgcaggagtttacgacaatcgacctcgccattgactggatcggagaaaatatggacgggattaccgacgttttatgacgggaaagcgaaagaaccagcatacgttctttcgcttttttacgtttgcgtcatggtatctaaaaaggtttgaacggctttacggtagctctccggatttttggtgtacgacatggcatgcccgcccgattcggccagatagagcatcttagggccgcgttttctgcggtgcagcaattcggaagaagcggaaggtatataatcatcttccttactgtgaataaacagcacgggctgccggattcggctgataaccgataaaggagatacatcacggatacggtatccttctctcatccgcaaaaagaaatcagccaaaggcagaagcggccacggaggcagccggaactcccgcttcagcctgtaggcgagctgatcgcgaaagcttgcgaacggacagtccgcaatataaaaatcagcgccgttttcatcctgatgcccgcccgcgtataataaggccgtcaccgctcccatcgattccccgtggatgccgatttgaccgacgtctccggttttgtgtctcacccaattcacggcttcttccaaatcatctttttcaaaatagccgtagctcgtcgttctgccgccgctttttccgtgcccgcggtggtcatatacgagcacattccagcctaaatctaaaaataaacccatgtatttcaatgaattgaacgaatttacggtaacgccgtgacaaataatcatggtgtttgccgtatgatgcggggcgacgtaaaagcctttgatctcatacccgtggcgcgacaggatgacggcatcttctttttccatggcctgaaaggaatcaaatctatcatgcccgtccgccgtttcttttttcatgatttcttcatccgtctttttcttcataaacataatcagattcgtaaaagcgaatccggcagccaaaaagactgcgcaagccgaaccgaacaccgccagccattttttcacacaggtgccctcctttaatatgaaaaatccttcctccggcttttcaggaccgtgaacgttgccggcctccggcgctccgtggtacacttgcctcaccatattcagatacggggggcgtaatgatgaaaaagcagctgcctaaagaaaaacacagcttaaaagacgatctggaggaagatctgaaggccaggcttttgcaaatgaaaagtgagctgaaggaagaagacgagaaaaaacaggcgcagcaaaaggcggaacaaatcagaaaacgaaaagaaaaagaaaaacataaaagctttgaagagctgctgaatgaaagcagtctcgattggcataaatataaataaaccggcatctgaaaaggtgccggttttattgtttaagaacgatgggcttcgtatacgtcccgttttgtatggtattgcaaggctttgatttcccggctgcttaaacgccgggcctctgcagccgaacagttttctctcagctgctcaagtgagctggctccggtgatgacagaagcgacggccggctgtgacagtaagtattgaagagaaagctccgtcatgctcaagtcaggtgcggcagcgctgatcgcttttttggtttctgccagttctgcaaaagaatatgttaaatagccgttctcttttacgcttgcggccgcttgatcaagcggtttttccgtaagaagccctttagcgacaggccctcttgcgactacgctgattccgttctcctctaaaaggggaagccactcctcgggacgccggtccagcaggctgtattgcatcataacgctggtgatatttgattttttcacatattctttaataacattcggacgaatcgaggaaatgccgtaataccggatgacaccttcctgttttaagtcctcaaaagcttcgatcgtttcgtcaatatggtcttccatcgtgccgccatgcagctgataaaggtcgatatagtccgttttcagccggcgcaggctgtttttgaccgcttcttttatgtatcctttggaagcgtcccaatgccagccgtctttatcatcattccagcggtttccggctttcgtggctaaaatgatgtcgtgcctgcggtttttgacggcttccccgacaatttcctcatttctgccgaaatcataaagatcagcggtatctaaataattgattccaagctcgatcgcttcatccaaaatagacagcgctttagctttatccgtgcccagcgacatacagccgagcccgatttcgcttatttctaaatcagaatgtcccagtgtgcgttttctcatcgtttcgctccttttaatagtcttttattgaccgtaatataaaggcgcgaagttttcaactgttaaggcctggtgatccaatctccgacatagcggaatgtccgtccgtattctttcagtttagcccgcacttcccacgcctttccgaccaatacgatactcttatccttccggtacaccttcaatcgaaaagcacctccctctcatgcatgtatgataaaatatatgaggcataatagagagacagaacgggagatgacatgatgaaacatttagaagaaaaaacacttgcgaaaaaaaagctgtatgacgggaaagtcatagatctttacttagaggatgtagagctcccgaacggaaaaacaagcaagcgggaaatcgtcaaacatccgggagcggtggccgtacttgcggtgactgaggaaggaaaaatcattttggtgaaccagttcagaaagccgctggaacggacaatcgttgaaattccggccgggaagcttgaaaagggggaagagccggaacatacggcgttaagagagctcgaggaagaaacgggatatacggcggaaaccttgacgaaaatcaccgctttttacacatcacccgggtttgctgatgaaatcgtgcatctctttcttgcggaagggctttcgccgctggaagaaaaacgagagctggatgaggatgaatttgtcgaagtcatgcaggtcacgcttgaagaggccgtgaagctgattgaatcccgcagggtgtatgacgcaaaaacggcgtacgcgattcagtatctccagctgaaagaagcgctgaaggaaaaatgatgaaaaccatctatgcggatctgcatattcatatcggccgcacctatacgggaaaaccggtcaaaatcaccggggccaaaacgttgacgctgcaccggattttagaagaagccagtgaggggaagggaattgaactattgggcatcatcgactgccattccccggaagtcatagaagaaatcgagcgcggaattgatgaaggcggataccgtgagctgaaagaaggcggcatccggtatcggaatacgacgcttctgttgggcagtgagcttgaaatctatgatcacacatgccgcgggccgattcacgttctcgtctttatgccggctcttgccgaaatgaagatgttttctgagtggctcgcaaaaaggcttaaaaatatccatctcagttcccagcgcatttatgaaaccggtttgaatcttcaaaggaaaacaaaggaattgggcgggctgtttattcccgcccatatgttcaccccgcataaaagcctgtacggaaaaggggtcatatcttctttgacagaagttttcgacccggcgctcattgatgcggcggaactcgggttaagctgcgacaccgacatggcttcgcgggtaacagaacttgatccgtatacatttttaacaaattctgatgcgcattccttaggaaaaatcggcagagaatataatgaaatgcttcttaaagaagcgaatttcacggaattttcgctggctttaaaagggaaggacggaagaaaaatcacggcgaattacgggctgaacccgaagctcgggaagtattaccggacggcttgcgaccgttgcggcagcccggttgaaaaaggagcttccgcctgtccggagtgcggggggaaaacaatgacaaaaggggtcagtgaacggctggaggaactgagcggaccgaaaaaaagccgcatgccgcggccgccgtatattcatcaaattccgctgcagttcattcccggggtcgggccgaaaacgttagaaaaactgaagcgggctttcgggacggagatggcgattcttcatcaggcgcaagaagaggaattggcgcgtgtcgtccagcctaaaatagcggctgtcattcataaagcgcgcaccgggcagctcgtccttgaggccgggggcggagggacgtacggcagaatcaagccgtaaaagccggtttttagcggagctcctcctgcaccttctttttcgtgcggacaaacgcaatcaattcgatgatttcatcctgattaagcggctgtccgtcaacggtcagtgtgccgaggccttgtgcggcgtttgttaattcgatggtctgggcaaacggctccgcctttttttcagtgcgcccgagtaaatcgtcgcacgtcgtgtcaaacagatcggcaagcgtgcccagcgcctcgaatgacggacgccggtatcctgattcatacccggcgtacgtgcttttggcgatgccgagacggtcagccgtatattgaagagaccaatttttcttttttctcagttcagttaaacgatctaaattcatattcaaaaccgctccttttcacttgagcaaattatatcatatcgatatgcaaaagtgtacgcgaattgaataataatcacttgattaatttcattcgtctgtctataatttgattaaaagtatgcgaaaagcgaatgcttaacacatcttgagaaatggatgaagaggtgcagggtatgaaaaaattattgctgttaacaaccggaggaacaatcgcctcagtcgaaggagaaaacgggcttgcacccggggtgaaagcagacgaattgttaacctacgtatcaaaacttgataacgattacacgatggaaacccattcgttaatgaacatcgacagcacaaatatgcagcctgaatactgggccgaaatcgcaaatgctgtcaaagaaaagtatgacgcatatgacgggttcgtcattacgcacggaacagacacaatggcttatacatcagcggcactgtcttatatgcttcagcatgctgataaaccgatcgtcattacgggttcgcaaatcccgattacatttcaaaaaaccgatgccaaaaaaaatatcacggacgcgatccgcttcgcatgtgaaggggtgggcggcgtatacgtcgtatttgacggcagagtcattcaaggcacacgcgccattaaattaagaacgaaaagctatgatgcatttgagagcattaactatccgtatatcgcgtttattaccgaaaacggaattgaatacaacaaacaagtgcacatgccaaaagacgatgcttttacggtcaatacttcactttgcacggacgtgtgcctgctcaagctccacccggggctgaaaccggaaatgtttgacgcattaaagggcatgtacaaaggaatcgtcattgaaagctacggcagcggcggcgtgccgtttgaaggaagagacattctcgccaaagtcaatgaaatgattgaaagcggcattgtcgtcgtcattacgacacaatgtcttgaagaaggagaggacatgagcgtctatgaagtcggccgaagagtcaatcaagatctcattatccgctccagaaatatgaacacggaagccatcgtgccgaaattaatgtgggcgctcggccagtctcacaacttggctgaagtcaaaaacattatggagacaccgatcgcagacgacgttgtactgtaaaaacatgactaccacaaagagaaagtagggttttagcatgacaaacgcgcaaaaagaatatcgtcaggaaaaagatttcctcggagaaaaacaaattgaagctgatgtgtattacggaatacaaacgctgcgcgcgaaagaaaactttccgattaccggctaccgcatccacgaagaaatgattaatgcgctcgccatcgtcaaaaaagcggcggcgcttgccaacatggatgtaaaacggctgtatgaaggaatcggaaatgcgattgtacaggccgcagatgaaattcttgagggaaaatggcatgaccaatttatcgtcgatccgatccaagggggagccggaacgtccatgaacatgaatgccaacgaagtaatcggcaacagagctcttgaaatcatggggcataaaaaaggtgaatacattcacctcagcccgaacacacacgtcaacatgtcacaatcgacgaacgacgtgttcccgacagcaatccatatttcaaccttgaaacttttggataagctccttgatacgatggcgcatatgctcagtgtctttaaagataaagcgaaacaatttgattctgtcattaaaatggggcgcacacaccttcaggacgctgtgccgatccgtctcggacaggaatttgaagcatacagccgcgtgcttgagcgtgacataaagcgaattaaacaatcccgccagcatctgtatgaagtaaacatgggggcaacggccgtaggtacgggacttaacgccgatccgcgctacatagaacaggttgtgaagcacctggctgacatcagcggactgccgcttgtcggcgccggccatttggttgacgccactcaaaacactgatgcgtatacggaagtttcagccgcgttgaaagtatgcatgatgaacatgtctaaaatcgccaacgatctgcgcttaatggcttcaggtccgcgcgcgggacttgcggaaatttcactgcccgcccgtcagccgggatcatccattatgcctgggaaagtcaaccctgtaatggcagagctgatcaaccaaatcgccttccaggtcatcgggaatgacaatacgatctgcctcgcttcagaagcgggccagctggagcttaacgtaatggagccggtactcgtatttaacctgcttcaatccatcagcatcatgaataacgggttccggtcatttaccgatcattgtctggcgggaattgaagccaacgaaaaacgtctcaagcaatacgtggaaaaaagcgtcggcgtcattacagcggtcaatccgcacctcgggtatgaagcggctgcgcgaattgcccgtgaagccatcatgacggggcaatctgtaagagatctttgccttcaaaatgatgtgctgacagaagaagaattggatatcattttgaatccgtatgaaatgacaaaaccgggaattgccggaaaagatctattagaaaaataaattttaaagcaacaacagccgccttttcacgttttttagtgaataggcggttgccatacaaagggatgaggcagtatagtataatttgttatatcatttgatgaaagcgttttagcttttttcttctagggggattttcttgtgaaagaggtcagattgccaaatttattggaaataattatcttattattcgggtttttagcacttgtcttatcgttcacagtgtttttagacttgccgatccagctagctctattaatatcctggtttttcgctattattctcggagtcaggctgggatattcatataaagacttgcaggattcgattgtcaccgggatatcaaacggtcttgaagcggtgttgattcttgtttcggtcggtgcgctcatcgggacatggattgccggcggcgttgtgccgacgttaatttattatggtttagagtttattaatcctcatgttttccttctggctacactggttatttgttccgttatgtccgttgcgaccggaacgtcgtggggaaccgtgggaaccgcgggaatcgccatgattgccatcggagagggaatgggtataccgcttccgatcgtagcgggagccgttttgtccggcgcttacttcggagacaagctttcaccgctgtctgacagtacggtgcttgcctccacgctttctaaggtggatgtgctgtcacacgtcagagcgatgatgtatctgtcaattccgtcctatattattacggccattctatttaccgtaacgggatttatatacggcggaaaaaatattgatctcgacaaagtggaatttttaaaatcttcactgcagaaaacgtttgacattcatatatggatgctcattccggctgttgtcgtcgttgtccttctgattttgaaaaagccgtctatgcccgttattatcatcggtgctttgcttggcgcaatctgggcttccgtctttcagggaatgaattttgccagtgccatcgcgactgcttataatggtttttctattaaaacggacgtcgaatttttaaacggcctgttaaaccgcggaggcattaccggtatgctggatacgttagccgttatcctgttcggtctcggttttggaggaattcttgagaagctcggcgtattaaaagtgattgtctcaacttttgagaaaaagctgaccacaccgggaaatgtaacgctttcgacattgatcgtcgcccttttaggaaacattttcggctgtgcgatgtacgtgtcattgatcctgacgccgaaaatcatggagaacagttatgataaactgaaacttgacagaagagttttatcccggaacgcagaggtgggcggcacgcttacttcagggatggtgccgtggtctgacaacggaatctatatggccggcattctcggcgtgtccacgttttcttatctgccgttcatgtggctcagttttgtatctatcggactggcaatattgtacggatacacggggaaattcatttggtacacgaaagaaaaatccttgcaatctcaaaaattgggttaggaggttcatttcatgattacaaagcatatgattcggacgttaatgattgaaacgccgactgttcccggaaatctcggaaaagtggcaaccgccatcggagtgatgggcggagatatcggggaagttgaaaccgttaaagtcggcccgaactacacaatgcgcaacattacggtgcaggctgaaaatgaagagcagctgcaggaaatcattcaagccattgaagctctcggtgaaggcatccggcttcatacagtctcagatgaagtgctctctgctcatgaaggcggcaaaattcagatgaaaagcaaaatgccgatccggacattggctgagcttggccgtgtttatacgccgggcgtcgccgatgtgtgcagactgattgaaaacgagcctgaaaaagcgtccatctatacgacaatcagcaattctgtcgccattgtcaccgacggcacggcgattctcggcctcggcaatatcggctctgtcgccggaatgcccgtaatggaagggaaagccgcgctttttgaccagctggcgggtatcagcggaattccgattttgctcgatacctctgatccggaagaaatcattcgcacggtaaaacatatttctccggggttcagcggaattctgcttgaagatatcggttcgcctcactgctttgacattgaagaccgcctgaaagaagaactggacattccggttatgcacgatgaccagcacggcacggcggtcgtcacgctcgccgccgccatttccgcttgtaaaagcgccggtcttgatttaaaagaagcgaaggtcggtcagatcggtctcggcgcggcaggcgtcgccatctgccgcatgtttatggcatacggagtcaaagcggtctgcggaacggacaagtcagaagacgcaatgaaccgcctcgctcagtacggaggtcagccgcttggaagcatcaaagaattaatggacacgtgtgacattgtgatcagcaccacaggagttccgggtctcattaaaaaagaggatgtcagaaaaggacatgtcattctggccttatctaatccgaagccggagattgaaccggaagaggcattacaagccggagccgcttatgcagctgacggccgttcggtcaataatgttctcggcttcccggggattttccgcggcgcgctgaacgccaaaagcaagaaaatcgaccatgaaatgcttgtggcggccgcagaagccatcgcctcttgcacaaaacacggcgatctcgtgcctcagcctttggatgcggacgtgcatcaggccgtatcagcagccgtagaacgggccgcggcaggaaaataaacaactcttacagtaccggacatgtgccggtgctgtttttttatcatgaataggaagcggaattcttaggcaggctaacgatagcaaaagacggaataaagaggtgtcgatgtggattattttccgctgatccatacaaatatttgggatgctgtgatcggcgtgccggtcgtcttatgcgtcacacagctgatcaaagtgttctgccgggttccgggcatattcgttcccacgattgcccttgctgtcggaaatgttgtgtctatcgttttcggtcaccatgaacacgtgtatgcggggatttttatgggatttttttacggatacgccgcaatggggagctattcatctgcgaaaacgtctctgcgcgcttaccggtcgaaacatgagccgtattcatgaacacatctggatttttttgttatgataaagaaaagggaaaaaggagcgattggcacatggcgaagagcaaaacgaaaaaaatgcgggagcatctcaaaagaaacgggatgcgtgacgcagtcctgtcaagggggacggcgccgtctttcagcacccatgaaagagtgacgaaaaccaaaaaagacaggcttgaaagaataaagcataaaaaaaggaacccctatgatcaccggagtgatgacgggggttcttttttttatgcccgaatctcgcgcctttctatgatttctctgtcatgttttctcttttctttcatacaatctactaaatcaagtcaatagattagcgggaggaaagcggtatgagaaaacaatcgtacaaagaactgttttttcgccatgtaaaggatcatctgtcactttatatatttgtgttcgtcttgtttttgatgggggtcattttcggggcgatcatcgtcaacagcatgaccatcacgcagaaagaagatctgtattactatttaagcaagtttttcggacagctgtctgacggaaaacatgccggcgcttcagaaatgttttggcaggccgtctttcatgatgtgaaatatttggggctgatgtggattctcggtatttccgtgatcggtctcccggttattttcattatggtgtttttgaaaggaatcgtcgtcggcttcacggtcggttttttagtgaatcaaatggggatgaacgggtttttcctgtcatttatttcggttctgccgcaaaacatcgttctcattcccgcatatcttatcatggggacatgctccatcgctttttcactgaaactgatccggcagctgtttgtcaaacgcagccttcatgacgcgccgatccaatggttcggacgctacgccttcgtgctgattctcatcgttttcttctcggtcatcgcctcgctgctcgaggcgtacgtgtctccgctgtttatggaaaagctgtcatcacgcatattttagaatgattatcacaaaataatacttttatttatcagtttataataattatagttggaactctgcgcgtattttgttataatgagtcatggaatgcggcgtaggagggaaagacatggaaaaccgtattgatcgaattaaaaagcagctgcactcgtcaagctacaagcttacgccacagcgggaagcaacggtaagagtgctgcttgaaaacgaagaagaccatttaagcgcagaagatgtatacctcctcgtaaaagagaaatctcctgaaattggtctcgctacagtataccgtacattagaattattaacagagctaaaagtcgttgataaaattaacttcggggacggcgtatcccgctacgaccttcgcaaagaaggcgcggctcactttcatcaccatttggtgtgcatggagtgcggagccgtcgatgaaattgaagaagatctgcttgaagacgttgaagaagtgattgaacgtgattggaaatttaaaattaaagatcatagattgacttttcacggaatctgccaccgctgccgcggggatgaaacagagtaaaagcctacgaaccttttctgccaggaaagggttttttgctgtttttatgtataaaagcctttgaaattggcataaggtgtactacagccgccaaaagaaagggtcgatcgaaagatgggcagattcctaaaaacagccgcggatacgatcaaagtgtttattctgttcacaggttttaccgcgctgttctattatgctatgatatgggtgaattcagagtatgaaaactatcatcggtacgataaaccggaaggctccgccgtcaaagtggccaaaacggaacatgaggagaaagacggctggttcggccgattgatctttttttaccaaaacggggagtagatcaagagtgaaggatcaaattaaggatttcatccattatgtgagggttgaaagagggctgtcccaaaatacgatgatgtcctatgagcgtgatctgaaaagttattctctcttcttaactgaaagccttcagatcacttcatggaatgatgtgacccgtcttcatattattcaatatttaaagcatataaaggactccgggaaatccggcaagacgtctgcgaggcatttggcgtcaatccggtcttttcatcaatttctgttaagggaaaaagccgcggataaagatccttcggtacatattgaaacacaaaaaacagagcggacgcttccgaaagtattggcgcttcacgaagttgagcggttattggacacgcctaagcttgacagcccgttcggtctcagggataaagccatgcttgaactgctgtacgcgaccggcatcagggtcagcgagatgatcgagctgaaattatccgacgtccatttgacgatgggatttgtccgctgcttcggaaaagggcggaaagagcggattgtgccgattggtgaagccgcttctcatgcgatagaagcatacattgaaaaagccagagggaaattattaaagaaaaacgtaaccgaagcgctttttctgaatcatcacggcaggcagatcagccgtcaaggtttttggaaaaacctgaaaaaaatcgcccttgaagcggggattaaaaaagagctgacaccgcacacgcttcggcactcttttgcaacgcacctgctcgaaaacggggcggatctgcgcgccgtgcaggagatgctcggacatgccgatatttccacgacgcaaatttatacgcatgtgacgaaaacaaggctgaaggacgtgtacaaacagtatcatccgcgcgcttaggagccgctgccagaggggccgcggctttttttgccggaatacagagaaggttctaattatttgaatcggcattgtcaacaagaatgtaaacggtttatacttgagttgtctgacctctgtaagctacaatggacagatggaagaaaaggaggtttttatgatgtctgaatacaaatataaccgggtatttttgatcgtaatggattctgtcggaatcggtgaagcgccggacgccgccgattttaatgatataggcgcaaatacgctcggacacatcgcagagcacatgaacggcttacatatgccccatatggcgcagctcggtctcggactgatcggagacattaagggcgtggaaaaaacggagcaccctcttgcgtactacggaaaaatgcaggaggcgtcaaacgggaaagatacgatgacggggcactgggagattatgggcctctacattgaaaaaccatttaaagtgttcccggaaggatttccggatgaacttcttcaggaacttgagcggcgttcaggacggaaaatcatcggcaataagccggcttcaggcacggcgattctggacgagctcggaaaagaacatatggaaacgggtgcgctgatcgtttatacatcagcagattccgtgctgcagattgcggctcacgaagatgtcgttccgcttgacgaactgtacagcatctgtgaaacggccagagaactgacgcttgatccgaagtacatggtcggccggattatcgcaagaccgttcgtcggagaaccgggcagcttcaaacgcacgccgaaccgtcatgattatgcgctcaaaccgttcggccgcacggtaatgaacggaatgaaagacagcggattagacgtcatttccatcggcaaaatttctgatatttatgacggagaaggcattacatcttcccgccgcacggtatctaatatggatggcatggacaaagtgattgaaacgctcggtgaagagttcacgggcctgagctttgccaacctcgttgattttgacgcgctgtacggacaccgccgcgatccggaagggtacggaaaagcgctcgaggaattcgacgcgaggcttccggaagtgtttgagaaaatgaaagaagacgatctgcttatcatcactgcggatcacggcaatgatcctgtccatcacggcacggatcacacgagggagtatgtgccgcttcttgtgtacagcaaaaagcacaaacacactgaacagctgccgcttgcggatacatttgccgatatcggggcaaccattgcggataatttcaaaacggaaaagccggaatacggaaaaagctttttatcaagattacagtagggggactttttttgaaacaaaagatcgaacgtgctgctgcatttattaaagaacacgtgaaagaaacaccaaagatcggtctgattttagggtcagggctcggcgtattggccgatgaaattgaaggggctgtcaagcttacatatgaaacgatccctgattttccggtctcaacggtagaaggccatgccggccagcttgtgatgggaacgcttgaaggtgtgcaggtcatcgcgatgcagggccgctttcattactatgaaggctactcaatggatcaggtcacatttcccgtccgcgtgatgaaggcgctcggcgttgaatcccttgtcgtgacgaacgcagccggcggtatcaacactgaattccgcgccggcgatctgatgattattacagaccacatcaactttacgggcaccaacccgttaatcgggccgaacgaagcagaattcggaccgagattcccggacatgtcagaagcctatgacaaagagctgtcaggcttggctgaaaaaacggccgatgagctgggcattcctgttcaaaaaggggtgtatacagctgtcacggggccgtcttacgaaacgcctgctgaggttcggtttttaagaacgatgggttctgacgctgtcggcatgtcgaccgtgcctgaagtcatcgtcgccaaccacgcggggatgcgcgtgctcggcatctcatgtatttccaacgcggcggcaggtattctagaccagccgttatcccatgaagaagtaatggaaatgacggaaaaagtaaaaggcggctttttgaagcttgtaaaagccgtagtcgcacgttctcaaaaataagtcagcatcagtcagctgtttcctcggaagcagctgtttttttgtgccctcaacacgaaacattttccagatgaggcgtataaaaccaccggatttggaaaaaataaaaaggattatgaaatggagggctttggagatgaaacgtcttatatccactttgttgattggcattttattaacggcatcagcaccgtccgcttttgcaaagccggacggaaaacatacatcggagctcgctcatgaagccaaaagcgccgtgctgattgaacgcgatacgggaagcattctttataacaagaacagccgggagcgtctggcgccggcaagcatgacaaaaatcatgaccatgcttttaatcatggaagcgcttgacaaagggaaaataaagatgagcgataaagtcaggacgagtgaacatgccgcgtccatgggcggatcacagattttccttgaacccggagaagaaatgacggtaaaagaaatgctcaaaggaattgctatagcttccggaaatgacgcatctgtcgcaatggcggagtatatcgccggttcagaagaggatttcgtcagccggatgaacaaaaaagcaaaagaattgggattgaaagatacctccttcaaaaacccgacgggactgcccgaaaaagaccattacagctctgcttatgacatggcgaaaatggcgaaggaattattaaagtatgataaaatcactcaatttacgggaacgtatgaggattatttaagagaaaatacagacaaaaagttctggctcgtcaatacaaaccggctgatcaaattttatccgggtgtagacggcgtgaagacgggctttacaggcgaagcgaagtattgtttaaccgccaccgctaaaaaaggaaatatgagggtcattgctgtcgttttcggagccagcaccccgaaagaaagaaatgcccaagtgaccaaaatgcttgattacgccttcagccagttcaaaacacacccgctgtacaaacgggatcaaatcgtcggaacggtaaaagtgataaaaggaaaaaagaaactgatcaagctgaccacatctgagccgatttctcttctggccaaaaagggagagaacatggacaaagtaaaaaaagaagtgaaaatcaacggcaatgtaacggctccggttaaaaaaggagaggtgctcggcagcctcgttctgaaaaaagacggaaaggtgctcgttgaaagcccggtcacggcaaaagacgacatggaaaaagcgggttttctcacttttctgaagcggacgatgggagattggacaaaatttaaataatcgtggcgaacgggcactagttttgtcatagtgaaggaattgctttcccgaaaatcgaaacactcattatccgatcatatcaaggaggaatgagcatgagccttggaattgactttcatgtcaaagaatccgtgctttgtattcgattaacaggtgaactcgaccatcatacggcagaatcattaaaacaaaaggttactgaatcgctggaggctgacggcatccgtcacatcgtgctgaaccttgaagatcttaccttcatggacagctccggcctcggcgtgattttagggcgttataaacaaattaaacagctcggcggagaaatggtcgtgtgcgcgatttcgcccgcggtgagacgtctgtttgacatgtccggcctgtttaaaatcatcaggttcgaacaatcagaacaaaaagcgcttttaacgttgggggtggcatcatgaaaaacgagatgcatcttgaattttcagccctcagtcagaacgaatcgtttgcgcgcgtaacagttgcttcttttatcgcacagctcgacccgacgatggatgagttgacggaaatcaagaccgtcgtatcagaagctgtaacaaacgcgatcatccacggctatgaagaaaactgcgacggaaaggtgtacatctccgttacgctggaggatcatgtcgtctatctgaccatacgtgatgaaggcctcgggattacggatcttgaggaagcgcgccagccgctctttacgacaaaacccgagcttgagcgctccggaatgggctttaccattatggaaaacttcatggatgatgtcacgattgattcctcgccggagatgggaacgacgatacgcttaacaaaacacctatcaaaaagcaaagcgctttgtaattaaggagatttgttatggatgtggaggttaagaaaaacagcaaaaacgcgcagctcaaggaccatgaagtcaaagaattaatcaaaaagagccaagggggcgaccagcaggcaagagacctcctcatagaaaaaaacatgcgtcttgtgtggtccgtcgttcaaaggttcttaaacagaggctatgagccggacgatctgtttcagatcggctgtatcggattgttaaaatccgttgataaattcgatttgtcctatgatgtccgtttttcaacttatgccgtgccgatgattatcggagaaatccagcgcttcatccgcgatgacgggaccgtcaaagtatcaaggtctttaaaagagctcggcaataaaatacgccgggcgaaagatgaactgtcaaaaacatacggaagagtgccgaccgtccaggaaatcgcggatcatttagaaattgatgcggaggatgtggtgcttgcgcaggaagcggtgcgggcgccttcatccattcatgagaccgtgtatgaaaatgacggagacccgatcaccctgcttgatcagatcgccgatcattcagaagagaagtggtttgacaaaatcgccctcaaggaagcgatcagtgatttggaagaacgggaaaaactcattgtctatctgagatattataaagatcagacacagtcggaggtagccgaacggctcgggatttcccaagtccaggtatcgaggctggagaaaaaaatattaaagcagattaaagtgcagatggatcatacggaaagctgaccttttacgggccggctttttttatttgtgcatcggtggtaatttatggtcttttgccgctgatgaatgagaacaaaagtgaaccacatactacatatataaccacccgaaagatggtgatgcaagatggaaagacgaatatttctcagacttcgccaccgcgtgaaagctcataccggagatatcatcacaatcggcgacgccgcgcagatcgcgggacagcaaaagctgaaaaaaaaactgtcggcactgccgctgtataaggtcacgaaaaaagacaaaaatatcgtcgtgctggacatcataaaagtgctgaaaaccattcataccgtttttcccgcgcttgatgtacagaccgtcggcggcgctgaaacgatagtggaaatccattaccagaaaaagcagctgtcagccgttttattcgtcggtgtctggctcctgctttttatcggttcatgtcttgccattatgaattttcatgaagatgtcagtatgagagaagttcatatcgccttatatgaaatcataacgggcgaacggaatgaatatccgtatctgcttcagattccatacagcatcggcctcggtctcggtatgatcgtcttttttaatcacatcttcaaaaaacgcctgaatgaagagccaagcccgctggaagtcgagatgtttaattatcagcttgatctcgatcactatgtcgcaatgcacgaaaatgaagagacgatgaaagatctgcatgatcgttagcattcttttcgttatatttgtcgggcttggcggagggctgaccgtgggtgcgggctttgtggcttttttaaccgttatgggaatcgtcccccgccttatgcagctgacaaaaacaatgcgctttgtacaggcctacgaaggagctgttatttcaggagctgtgttcggcggctgggaaaccttaaatatgaatcattttttttatctgaatggctggccgttccggtcgggcttttggccggcatgtttgtcggcatgctggccgccgcgcttacagaagtgctgaatgtgcttcccattcttgccaaacggatcggcttcggcagcaaaatcatcatattgctgatggccattgtgttcggcaaaatagccggctctttatttcattggctgtattttatccatcattcataaggaggaaccgacgtgacaaacttaaaagaaaattacaaaacaaaagtgaaagactatcagccgaaaccgccatatgtttggaattgcgtcaaagcctttctgatcggcggtttgatctgtctgatcgggcaggctcttcaagacttttacatccacttttttaattttaatgaaaaaacagcgggcaacccgacgtccgccactcttattttaatatccgcccttttgaccggattcggtatttatgacagactcgggcagtttgccggagcgggttcagccgtgccggtgacaggttttgcaaacagtatgacaagcgccgctctggaacacagaagtgaaggactcgtgctcggggtagcgacaaacatgtttaaattggcgggaaacgtcattgtattcggcgtcgtggcagcctatatcgtaggcctgatacggtttgcttgtgaaaaactgttttcgtaggaggagaaaaaatgaaattgaccggaaagcaaacctgggtatttgaaaacccgttatttgtaaatgcggcggggacggcagccggaccgaaagaaaaagacggcccgctcggttcgctgtttgataagacatacgatgaaatgcattgcaatcagaaaaactgggaaatggcggaacgtcagttaatggaagatgccatcaactccgctttgcaaaaacagaatttgaaaaagagcgatattgatttgttgctcgcgggggatcttttaaatcaaaatgtgaccgccaactacgtcgccagacatctgaaaattccgttcctctgtctgttcggcgcctgttcgacttcaatggaaacgattgccgtcgcatccgcgctcattgacggcggttttgcgaaccgggcgatcgcagccacgagcagccataacgcgacggcagaacggcaattccgcaatccgacggagtatggcgggcaaaaaccggataccgccacttcaacggtcacggggggcggggcggtcattatcagccaaaacccttctgatatcaagattacaagcgcaacagtgggaaaagtaagcgacctcggaataacagatccgttcgatatgggatccgccatggcgcccgctgccgccgacacaatcaaacagcacctgcaggacttgaaccgtacggcggatgattatgatctgattttaacgggtgacctttcaggcgtcggctcgccgatcgtgaaagatttgctcaaagaagaaggctatcccgtgggaacgaaacacgatgactgcggtcttctcatctatacgccggaccagcaggtgtttgcgggaggaagcggctgcgcctgctccgcgcttgttacgtacacacatatttttaaccaattaaaagcagggactctaaacagggtactcgttgtcgcgacaggagcgcttttaagtccgacaatgatccagcagaaggaaaccattccgaccatcgcgcacggtgtggtatttgagcgggcgggaggtgcatcataaatggaatatctgttggcttttgtttgcgggggaatcatatgcattatcggtcagctgctgcttgacatttttaaactgacacccgcccatgtaatgacaacttttgtcgtcatcggcgccttgttagatgggttcggaatatatgacaaatttatcgaattcgcgggcgcgggcgcgacggttcccatcgtcagcttcggtcacagcttattgcacggcgccatgcatcaagctcacgagcatggatttatcgggatcgccatggggatttttgaacttacttccgccggtatatcttcagcgattttattcgcatttcttgtagccgttatttttaaaccgaaaggataatgcctgatgacgaaacggaaggtcattcttgtgacagacggggacgtatacgccgccaaaacaattgaatatgccgcggaacaagcaggcggacggtgtatttcccaatcaaaaggcaatccgtcaacgagaagcggccccgaacttgttcagctgattaaagccgcgccgaatgacccggtgtttgtcatgtttgacgattcaggcctgcaaggggaagggccgggcgaaacggcgctgaaatatgtcgcctcacatcaggacattgaagtgctgggggtgattgcggtcgcttctaagacccatcaggctgaatggacgaaagtcgatgtctccattgaccgtgatggagaagtgacggagtttggcgtcgataaaaccggaatgagagaaatggacgagcacagaatgaacggagatacggtgtattgtctggataaattggacgttcccctcattgtgggcatcggcgacataggaaagatggggagaaaagatgacatatccaaaggctcgccgatcacgatgaaggcggtcgaattcattttagaaaggagcgaaagccatgccggaaaaaccggaaaacatgatcaaggtgtaccgggatcctagaaaaaatgaacaattttttaaagaccgcgtcggtatgggaacgagctatgatgtcggcgtccgcaaagttcgagtattagaccgggaagtccagatttactttgtcaacggattaaccgatactttgtttatcgttcatttaatggaacagctcgtcgacatcaataattatgacgagaatgcggatgaagcgattgacgttgttgaaaacaggcttgttaatcagcaggtccaaaaagtcaaaacgctcgacgaagtaacggatcaggtgctttccggacttgtcgccgttatcgttgaagacgcgggcttcgcctttatcgttgacgtcagaagttaccccggacgcacacctgaagaaccggatacggaaaaggtcgtccgcggagcaagagacggttttatcgaaaatatcgtcattaatacagcattgataagaagacgaatcagggacgaaaggctccgcgtcaaaattacgaaagtcggcgagcgctctaagaccgatcttgccattgtgtatatagaggacatcgcggatccggaccttgtcagcatcgtcgaaaacgaagtgaatgcgattgacattgacggattgacgatggctgataaaacggtggaagaattcatcgtcaaacagggctacaacccgtttccgatggtcagatacacggagcggccggatgtggccgccaatcacattttggaagggcacgtcatcatcgtcgttgatacgtcaccgagcgtgatcataacgccgacaacgatttttcaccatgttcagcatgcggaagaatacaggcaggcgccttcagtgggaacatttttaagatggatcagattcttcggtattatcgcttcaacggtcctgcttccgatctggttcctctttgttcttgaaccgtctcttctgcctgaaagactggattttatcggtttaaataaaaatacgcatatcccgatcattctgcaaatctttttggccgatttggggattgagtttctcaggatggccgcgatccatacgccgaccgctttatccaccgccatgggtctgattgcggcggtgctgatcggtcaaatcgccatagcggtggggctgttttcagcagaagtgattctgtacgtatcgatcgccgccatcggatcatttaccacgccgagctatgagctcagcctcgccaataaaatgatacgcctcatcttaatggttctcgtggccattttccaagtgaaaggctttgtgataggctttacattgctgctgatcataatggcgaatatccgctcgtttcacacgccgtatttatggccgtttttaccgtttaacggcaaggcgctgtggcaggtgctcgtccggacgacagtgccgggagcgaaagtcaggccgagcattgttcacccgaaagaccgtcaaagacagccaagcggttcataatcgcattgaaaccgacagaagattatgatattgtatgtcttaacttatacgggacttgtataaggacagctcaaaagaagctgtccttatcacccatatgcggatcagaaagagggaatgagcattgttcttacatggcacaagcagacaaaacaaactaggtcatttggaaatcgggggtgtggacgcgctgtatttagcggagcattacggcacgcctctttatgtttacgatgtggctttaatacgtgagcgcgctaaaagctttaaacaggcattcattgatgcggatttaaaggcgcaggtcgcgtacgcgagcaaggcgttttcttctgttgcgatgatacagctcgctgagcaggaggggctctcattggacgttgtatccggcggagagctgtttacggcggttgcggctggttttccggctgacaggattcattttcacggcaataacaaaagcgaagaagagttgaaaatggcgctcgatcatcaaatcggctgcattgtcgttgataatttttatgaaatatccttactcgcggaactgtgccgcaaatcagggcgcacaatggatgtgcttctgcgcatcactccgggggtagaggcgcatacgcatgattatattacgacgggacaggaagattccaaattcggttttgatctgcataacgggcaaatagaaaaggcgattgaacaagtattacagtcagaccatatccgcctcctcggcgttcactgccacatcggatcacaaatttttgatacggcgggctttgtgctggccgcagaaaaaatcttcacaaaactgaatgaatggagagaatcattcggctttgtctctgaagtgctgaatttagggggcggctttggcatccgctacacggaggaagatgaaccccttcatcccgccgtttatgtggaaaaaattatcgaagcggtaaaagaaaacgcagcgctgcacgcttttgacattccggagatctggattgaaccgggacgctcgctcgtcggagacgccggaacgacgctttataccatcggttcgcaaaaagaagtgcccggcacccgtaaatatgcagcggttgacgggggcatgagcgataatatccgtcctgcgctgtatcaggcgaaatatgaagccgtatcggcaaacagaatcggagaacaccacgacaaaacggtatccatcgcgggtaagtgctgtgaaagcggtgatatgctcatttgggatatagatcttccggaagtgaaagaaggcgatcttctcgccgttttctgcacgggagcgtacggatacagcatggctaacaactacaaccgcattccgcgtcccgccgtcgtttttgtggaagacggcgaagcgcatcttgtcattagaagggaaacttatgaagacattgtaaaactggatctgccgtttaagacgggggtcaaacaataaataaaaaagagaccggaacaatggcgtccggtctctttttgcattcagctgttagaacttgatccgctgtctcctgtaaatacagacacgatcgcattccaaatcgaagcgaagaaatcaatgactttttgaacaaagcttttgccttcatcggattgaatgaacttcgtgattttgtcttttgccttatcgagctggctgccgacttggccccaatcaatcttggcgtttttcattttattaaacaatgaaacgagctggtctttttgagcgtcagtcagtgtaatgttaagatttgaagccgcatcatcgacctttttctcgattcctacttttgtatcgggcacaccgtttttcgcgaaatcatctttaatgtttgcgatcagcgcggaggcgtttttatctccgattttatccccgagatctgatgtcgtaacaagctcttggttggcgacttgttttacatcttctgaaatcgctttgtctgatgagacttcataagccttgatgattcccgttaatgctgcggtgcctgatacctcaaacggcgccgtcacgtatactttcgcatctttcactcctgctgtcatcagggcgtttaagtacatttcatccgtgatggaatcgatattatgagtcttaacgtcaagcccggaccctttctttgccaccgtgatggatgatgaagagatggctcttgtgccgatttgggcattcgatatatattttcccagatattcatgttcttctttattcgtgaccgtcacttttgtcgcgttatcagggacatttaattcgtcaagcactttctgacggttttcgtttgacagatccgcccccagtgtgacgatgacatctccgactgcggcatcggccaggctgattttcggtattgtgcacaatacaacggccgccgccagcaatccaatccacatttttttcaaagcggttaacctccttcttttcacaaatgccgttttgaagcggtttgtgagggcctgcgtgaagcagttccgatacatagacggctgtgaagctgttcaggtttcattttctttctgcggaagcggggagattcgttttccggctgaaggtgtggtataatagccgcgaaaagaagagcagaggcctcttccttcaaaagaatatcaaaaagaaagccggcttacaattgaaattcatattgaagaaggctttgacaaaaaacaatacggaagtaggaatgagaatgaaaactggttacatcgaaatggaaaacggcagcagaatcgaatttgaactttatccgaatgaagcgcctaatacagtcgctaactttgaaaacctggcgaatacgggcttttatgacggcgttattttccaccgcgtgattccgggctttgtcagccaaggcggagatccgactgggacaggcatgggcggaagcggaaaaacgatcaaatgtgaaacagaaggcaatccgcataagcacgaagccggttctttatcaatggcgcatgccggtaaagacacgggttcaagccaattcttcatcgtacatgagccgcagccgcatttaaacggcgttcatactgtattcggaaaagtgacaagcggtttagagcatgcgaaaaacatgtctaacggggacaaaatgaaagaaatccgtgtagaaggataatgaaaacccgcctttttcaggcgggttttttttatgtatatgaaaattctcatgtgtaaatcatgaaaaaatacatatatgaacgatagcagttcctctggtatagtgataaagaccgattacaacaatgaaaagaggtagaaacgttggttcaattggcaaccgttttatttgtcattatcattctcgcacttataatttggttcagggtgaaaaaggggaacaggccgattaaaggcggcggcttcggcatcattctcccgcttttaattatcgccgtcatttttacattcagcgtcagccagctcatgaatatcccgggaaagccgtttcattttcccgctctttgggagctcgccatcgccggactgttaggcgcggtattcggtgtcatcatgctgtcgcaaaccgcctatgaaatccgggaagacggctttgtctactccaagcggaataaaaactttaaatatgtcattatcgcgattattgcgatccgtatcgcgctcagccaatatttcaaaaacattgacgcggcggaattcgccgttttaacgatggaacttgcttttgtgtatttgtgcatttggcggatcggaagcttcgtgaaataccgtaaaatcagcagatccggcttataaaatgaaaaaaatggatgaggtgcggggcttatttgccctctgtgcagggattcatggtaaaataaaaacgaccatggctaatgggaggaaatcacttgaaatcagaaaaagaaaaaacttctaaaaaaagcgccgtacttgattgggcgaaagccattatcatcgctgtcgttctggcactgctcatccgaaactttttatttgccccttatctcgttgatggaagatcaatggatccgacgctgcatgaccgcgagagaatctttgtcaatatgacggtcaaatacataagcgacttcaaacgcggccagatcgtcgttctgaacggagaaaatgaacactatgtcaaacggattatcggactccccggcgacacggtgcaaatgaaaaacgatcagctgtatatcaacggcaaaaaagtgtccgaaccgtatttagcggcaaacaagcacaaggcgaagcaagacggctatgaccggctgacagaagacttcggcccggtgaaggtgccggacgacaaatatttcgtcatgggtgataaccgcagagaatctatggacagccgcaacggcctcggtctttttacgaaaaaacaaatagcgggtacttcaaaattcgtcttcttcccgtttaacgaaattcgcaagacgaaataaaccgtacaggcagttttcttataagaaaactgcttttttatataaatttatctttccaccctcaaaaacagaacataaattcgtatatctatttaatagatagaaagttttacagatacatgaaacatcttccctttatgaaacgttatatgagtaactcacgcagggaagaacggttttctattcatgaacaaaaggaatatgacatagtaatgaatagattgatacgggctggaggtagaaaaatgggaagaattaaaacaaaagcagccattttacttgtactgctgctgttattagcgggcggttatatggtcataaacgatattgaactgaaagacgtgccgactgcaatcggacaaaccctgtcccaggaaaaagaagaatatacagtcaaaacatataaaattacgaaaatcgaaggaactgagtaccacggtacggcagaaaacggcacaaaaattatttttaacggcgacaagctgaagcaggatctctccgatgtgaaaaagggagataagattaaagcgtatttcagcaaatcaaaccggattgacggcttattgaaggtcgtcaaagtgaacgaataaataaaggcgcccttttatgagaaaagggcgctttttatttttctgaataattaggtgcaaattcattgcgcctgccgcaaaggatgttataatagcggataaggacaaaaaaatattgattgtatccttcggggctgggtgaaaatcccgaccggcggtaataaggcgttttgcgctttacagcccgtgacccgtatgcatctgtatacggtggattcagtgaaaagctgaagccgacagtgaaagtctggatgggagaaggatgagagaagctatgcaaaaaataaacttactgtatagtcttatttcctatggattaaaactggaaaagccccgaactgtgtaaacattcggggcttttttgacgccaaattgcgcggaagaagggagggataacgatggaagaatattatatgaatacggcaatagaacttgccagacgcggtgaaggacagacacagtccaatcctcttgtcggcgctgtcgtcgtcaaaaacggacagatcgtcggaatgggcgcccatttgcaatacggagaagcgcatgccgaggttcacgcgattaatatggccggcagacacgcaaaaggcgccgatttgtatgtgacgctggagccttgcagccattacggaaaaacaccgccatgcgccgaactgataataaagtcggggataaaaagggtgttcatcgctgtgaaagatccgaatccgcttgtagccggaaaaggcatcggaatgctggaagcagcgggcatcgaagtgaaaaccggacttctcaggcagcaggcagaagagctgaataaaatgtttcttcacttcatgcggaccggacttccgtatgtcaccttgaaagcggccgcgagccttgacgggaaaacagcgactgaaaccggtgacagcaaatggattacatcagaggcggcaaggcttgatgcccagcaatacaggaaatcgcatcaaagcattcttgtcggagcaggcacagtcaaagctgataatccgagcctgacctgcaggcttcccgatacggtgaagcagccggtcagagtgattctcgatacaaagctgaccattcctgaaacggcaaatgtgctcactgacggcgctgcgccgacatggatatttacggccaaaggtgcagacgtgcaaaagaaagaccggctgaccgcactcggaataaaagttattccgctggaaacagaccgcattcacgtccctgaggtgctcagcattcttgctgaaaacggcataatgtccgtttatgtggaaggcggagcatccgtacacggaagttttgtcaaggaaggctgtttccaagagcttcatttctatttcgcccctaaattaatcggaggaacgcttgctcccagcttgatctccggtgaaggttttcaatcaatgaaagatgtcccccatttacaattcacacaaatcacccaaatcgggccggatataaaactgacggccatacctaaagatggaaaggatggtgacgatgtttacaggaatcgttgaagaaacaggcacgatccaagcaatcaaaaagacaggcctttccatggcattaaccatcgccgctccaaaagtgacaagtgatgtgaagcttggcgacagcattgcggtaaacggcatctgcctgaccgtaaccggattttctgacaatcaatttacggttgatgttatgccggaaacagtgaaagccacttcgctgaacggcttgtcaaaaggcagtaaagtaaacctggaaagagcgatgtccgccaacggacggttcggcggccactttgtatcagggcatgtggacggaacggcggaaattacgcggatcgagaaaaaaagcaacgcggtctattacgatttaaaactttcgccggaattgacaaaaacgctcgtattgaaaggttcaattacggtagacggcgtgagcctgacgattttcggtttatcagacgaaagcgtaacggtatccatcattccgcataccatctcagaaacgatttttcagacgaaaacagtcggatcgaccgtaaatattgagtgtgacatgatcggcaaatacttataccgctttttgcacaaaacagaacaaacgaaaagcaatcaaactatcacggaagcctttttaagcgagaacggcttttagaaaggaagatcgatatgtttcatccgatagaagaggcgttagaggcgctgaaaaaaggtgaagtcatcattgttgtcgatgatgaagacagagaaaacgaaggagatttcgtagcgctggctgagcatgccacgccggaagtggttaattttatggcgacccatgggagaggcctgatctgcacgccgctgtctgaagacatcgccggccggctggatcttcacccgatggttgatcataatacggactcacatgagaccgcgtttacggtcagtattgaccacaggctgacaaaaacgggcatcagcgcgcaggaacgatcctttaccattcaggcgctgttgaacgaagaatctgtgtctgacgattttcagcgtccgggccacattttccccttaatcgcaaaaaaaggaggcgtcctgaagcgggccggccatacggaagcagccgttgatcttgcaaaagcctgcggatctcagggagcgggcgtcatttgtgaaattatgaatgaagacggcacaatggccagagtgccggagttagccgaaatcgccgaacgccaccagctgaaaatgattacgataaaagacttaatagagtaccgttacaacattacgacacttgtgaacagagaagttgatattacgctgccgactgacttcggcacgtttagagtttacggatatacaaacgaggttgacggaaaagaacatctcgcctttgtcatgggggatgtcccgtttaacagcgaacccgttcttgtcagagtgcactcagaatgcctgacgggcgatgtatttgcatcccatcgctgtgattgcggacctcagcttcatgccgcgcttgcgcaaattgctgaagaaggccgcggcgttctattgtatttgcgccaggaaggcagaggaatcggtttaatcaataagctgaaggcgtaccgattgcaggaacaagggtatgacacggttgaagcgaacgaagcgctcggctttctgcctgatctgcgcaactacggcatcggcgcccagattctccgcgacttaggggttcagcatatgaaacttttaaccaacaacccccggaaaatcgccggcctcgaaggatacggtctcagcatttcagaacgggtgccgcttcaaatggaagcgagtgagcataacaagcaatatttacagaccaaaatgaaaaaacttggacatctgcttcatttctaaaaacaaatctcacaaaaaaggatggataacatatgaatatcatacaaggaaacctagtaggaacaggacttaaaatcggaatcgtcgtcggcagatttaatgaatttattacgagcaagctgttaagcggagcggaagacacgttgcttcgccacggtgtagaatcaaacgacattgacgtcgcttgggtgccgggagcatttgaaatcccgtttgcggcaaagaaaatggcggaaacgaaaaaatacgatgccgtcattacgctcggcacggttatcagaggagcgacaacgcattatgactatgtctgcaatgaagcggcaaaaggcattgcccaggcgggaacggcgacgggcgtcccggttatcttcggcatcgtgacgactgaaaccattgagcaggccatcgaacgagccggaacaaaagccggaaataagggagcggattgcgcggtatctgccattgaaatggcaaacttaaaccgttcatttgaataatttgttgaaaagcgtttaaaacagcggcgaaaatgatataatgtgaggaaacggatcgcctttatgtatccgtttgatagaacatgaatggacattttggatatagaggggtttttatgttaattcgttataaaaaatcgtttgaaaagattgcgatgggtcttctgtcatttatgccgaatgaaaaagatctcaagcagcttcagcagacaataaaggactatgaaacggatactggccgccagctctttctttggaaagaggatgaagatatcgtcggagcgatcggagtcgaaaaaaaggactcagaagttgaaatccggcatatcagcgtgaatccttctcaccgccatcaaggaatcggaaagcaaatgatggacgccttaaaacgtctgttcaaaacggaggcactcgttccgaatgaattaacgcaaagcttttttgaacgctgtcaacatcaaaaagatcaggatatctcatataataactgacaaatgctcccggaatcttcacggtttcgggagctgttttgatatagaaaaagcagggctgaccgtcagcctctgcttttttttcttctctcaatttcccgttcgcgttccttaatgacatccgtcctgtcccgcaggcggtgtttatgaataagaaaggtatctgatacgccgtcttgcccccatgtatagccctttcggcggcattcggcaagacatgcttttttcagggcttcatctgtaatcggcagcataacacttttataaggctggcccgcttctatatcgtctgccagcgtttctatcagctcaatcagcttcggatggctgagaccgagagaacagaccgcctgcttttcagaccggagaatacgtaagctgttggcaatcagccgtttcgccccggcttcatttcccctgcgctggtgatacagagcgacggcaagctgaatcaggccgacccaatgaatgctccgcttttcagccgtgctttctttccaatattcctctaacagttcatgacactcaaaataatctcttgatgcgtgaaattcggccaaaaagccgatataagctttaggatacaagccgcttcctccttttatgctaaaaccagtgtaccacagcgctatgaaaaggaaaaaagagcggcttggtgcctgaagcctgaggaactagcagatgtaagatgctcctacgacaacgagcaaaataaacagaacgacaattaatgcaaaacctccgccgaaacaagctccgctcatgtgaaatcagcctccctttgtttcaagtttacacggctatcatatgtgcatccgcctttaaaggtataggcgtatatcttctttttcagtattttctaaataacggaggacgtgtataaaagtattggacgagagcatttcggtggattatactaaagggtagccagtttttccggcaatgagagtgatattgaaaatggtgagataatggtagaatatcaagtgaaaattgatacgtttgaaggcccattggacctgctgcttcatctgattaaccgtcttgaaatcgacatatacgacatacccgtggcaaccattactgaacaatatttattatatgtacatacaatgcaagagcttgaacttgatgtcgccagtgaatatctggtcatggcggcgacgcttctcagtattaaaagcagaatgctgcttccgaaacaagaggaagaactgtttgaagacgaaatgcttgaagaagaagaccctcgggacgagctgattgaaaaactgattgagtatagaaagtataaaaccgctgcgaaggatttaaaagagcgggaagaagaaagacaaaagtcatttacaaagccgccgagtgatttaagtgagtatgcaaaagaaatcaaacagaccgagcagaaactgtcggtgaccgtttatgacatgatcggcgcgtttcaaaaggtgcttcagcgtaaaaaaatcacgcggccgaaagaaacgaccattacaaggcaggaaataccgattgaagacagaatgaacgaaatcgtaaaaagcttaaaaacggcgggtagaagaataaacttcacggagctttttccttctcggcaaaaggaccatctcgtcgtgacgtttttagcagtcctggaactgatgaaaaatcagcagattatcattgaacaggaagaaaacttttcagatatatacattacggggagtgaatccattcatggcgcttgatatcgtgaattggaaagcgattgtggaagccctgctgtatgcggcgggtgatgaagggctgaccaaaaagcaattggtgacggtgcttgaaatagaagaagcggaactggccggaatcatggaagaagtggccgctcagtacaaggaagacgacagaggcatcgagcttaccgaatatgcggatacgtatatgcttggaacgaaaaaagaattcgtgccttatttgaaaaaactaatcgaagtgccgtcaaaagggctgtcacaggcttctttggaagtgctggcgatcgtttcgtacaagcagccgatcacacgggcggaaattgaagatatccggggcgtgaagtctgaacggattctgcacagcctcgtgtcaaaagcgctgctgtgtgaggtgggccgcgccgacggtcccggccgggcgattttatacggcacgacaccggtatttcttgaacaattcggcttaaaaacattggaggagctcccgccgcttcctgaaaatgcggaggaagacgttctccaggaggaagccgatttattctttgaaaacttcaaccaaacttttgaggatattaaataataatcgtttttcatcatacgatagtaaggaaaggccattgatgaatgacgcaaatgacgacgtacaagagaggaaggaaacggacggaaatgggaaattcgattgtgagggcccatactgaagaaactggtgaatttttagccgaggttgtcacgatggtcagcagctatttaaatcatacaacattgccggagatgcgggctcaaggagaggcggatgaggcatactgccgcgacgtgctcagtgtgctgaggaggatgaccgtcttttgcgaaggcgcccaggaagcctgcaggcggcttttaatgcaggagccgtttcatgaggtgagagcggaaaaaacgctgtataaagtgtatcatcagtgcgtggaagagtttttcatgccgaaaaaggatacatggtacgaaaacagccgcgccgcttatacaggccaaagcgcgattgaattctaccagcaagtgccggactcgctgcggagccttctgctttcgctcagcagtgaatttctgcgcatgcgggaagaattagcgcaatatgaagcatcaggctcaaatatggcatcagtcagataaaaactcttccttttgggagagtttttttatgtgaaagtgacgcaattggtattcataagtcatggacatgcgcataaacttgtacaaacccacaacaaggacgtgagcattcatgcgctttctcaaaaaagctgccgtatttcttttgacttttgttattcttttttccattacagacggcaatacggcacatgcccaaatacatgtcagcgcaaaaagcgcgattataatcgacggagcatctggcagggtgttattcgccaaggatgaacatcataagcggcggattgcaagcattacgaaaatcatgacggcggtgctggcgattgaatcagggaagatggaagagaccgtgacggtttccccgaatgccgtaaaaacggaaggctcagccatttatcttcagccgggacaaaaagtgaagctgaaagatctcgtatacgggcttatgctgagatcaggaaatgacgccgctgcagcaatagctgaatatgtcggcggaagccttgacggttttgtatttatgatgaacaaaaaagccgagcaaatcgggatggaaaatacaaaatttcaaaatccgcacggactggacgaccatgaaaatttatattcaacggcgtatgacatggcgcttttgactaaatatgcgatgaaaatcaaggaataccggaccgtttcaggcacaaaagtgtataaggcggaaacgatggaccgggtatggaaaaataaaaacaagcttctgactgggctctaccgttacagcacaggcggaaaaacgggttacacaaaaatcgcgaaacggacgctcgtctcgacggcctcaaaagacggtacggatctcatcgcggtcaccataaatgatccggatgattgggatgatcatatgaatatgtttaattatgtctttgatcactataaaacctatgtcgtcgccaaaaaaggcggcattccgaagctgaaaaagacgttttacggaaagcgcgcttttattgcccgggatgtcaaatatttgttaaaagaggatgaaatcgacgatgtgaaaatccgcacaaccttaataaaaccgaaaaaagcctggaaaaaggacgcctctctcattcctgatgtcgtcggccggatgactgttatgcatgatgggaaagtgatcgccaagatccccgtctattatgaaaacgagcgccataaaaaaccgaaaaagcatttcattgagacgtttacgagcctgtttatgagcgcggcgggcggttcgtcatggtcaatttaatctgggtatgtctgacggtaatcggacttgtctttgcgatgtttaacggtaccttgcaggatgtgaatgaagccgtttttaaaggagcgaaagaagcggttacgatctcgttcggattaatgagcgttctcgtgttctggctcggcctgatgaaaatagccgagcagtccggccttttggatatattcagcagaatgtgccgcccgtttatttctaagctgtttcccgatattccccctgatcatccggcgatgggatacatcttatcaaatctcatggcaaactttttcggactgggaaatgcggcgacaccgctcggcattaaagccatggagcagatgaaaaagctgaatggaggtaagtctgaggccagccgttccatgattacctttttggcggtaaatacttcgagtattacattgataccgacaaccgtcattgccgtgcgcatggcttactcggcgaaatcaccgaccgatatcgtcgggccgaccatcttagcgactttaatttcgggaatcggcgcgattttcattgaccgctacttctggtaccgccgcaaaagaaaagggaggtaagcgaatggaaatggtgaattggctgtctttagccatgattccgattattatcgccggtatattgatatacggcacgatcaaaaaagtgccgacgtatgaatcattcgttgaaggcggaaaagaaggaattgagatagcgttttccatcattccctatttggtcgggatgctggtggcgattaccgtattccgggcctcgggcgcgctggattttgtcatggggctgtgcaagcctttctttacagcgctcggcattcccgcagaagtcgtgccgcttgctctgatccgcccgatttcggggacggcggcgctcggcatgacgacagatctgatcgccgtgtacgggcctgattcatttatcggcaggctggcttcggtcatgcagggatcgactgacacgacgctgtatgtcctgacggtgtatttcggggcggtcggcatcaaaaaaatgggggatgctttaaaggttggtcttctcgctgatttgatcggggtggttgcatcaatcatcatagttacgttattatttggaagcgcctgaaatcaggcgctttttatatatcaaaataactctccttgaaaaagcttgtttgttcagggggaaaaaagtaagattatacttgaggtgaacgacatggaaagactgcaaaaagttattgctcatgccggcgtggcatcacgcagaaaggcggaagagctgataaaagaaggaaaagtaaaggtgaatggaaaagtaataacagaactcggcgtaaaagtgaccggttctgatcagattgaagtaaacggattaaaggtggagcgggaagaacccgtgtactttctgctttataaaccgagaggagtgatctcagcagctgatgacgacaaagggcggaaagtggtgaccgactttttcaaagaagtgccgcagcgcatttatccgatcggcaggcttgattatgatacgagcggacttttattgctgacaaatgacggcgagtttgccaacaaactcatgcatccgaaatacgaaattgataagacgtacgtcgccaaagtgaaggggattccttccaaggaacttttgagaaagcttgagcgcggcattcagcttgaagaaggcaagacggcgccggccagagcgaaaatgctttccctggacaaaagaaagcagacgagcatcattcagctgacgattcatgaaggacggaacagacaggtccgccgcatgttcgaggcgatcggtcatgacgtgctgaaactaaaacgtgaagaatacgcatttttagatttaagaggcctgcgcacaggagacgcaagagaattgtcgccgcatgaggtgaaaaggctgcgggctttagctgaacacggtaaaaacgctttctaattttcacataaccttcaaaaattacaaaacgtgttgatgatataattgaatggatttgcaggcaggggaggggagcagtgtacaatgaacaaaaaacggcggcgtttattcattcggaccggcatccttctcatcttactctgcgcgctcggatataccatctataatgctgtttacacaaacggcgagcgtatatctgaggggtccaaagccccgaatttcgcgctgaaagatacagagggcagactcatagaactgagtcagttaaaaggaaaaggcgtttttctgaatttctggggaacgtggtgcgagccgtgcaagcaggaatttccctacatggagaatcaatacaagcattttaaagacctcggtgtcgaggtggttgcggtaaatgtcggcgaatcaaaaattgcagtacataactttatgaaaacatacggcgtcaatttcccggttgcgctcgatactgaccggcaagtgctggacgcgtacggcgtatcacctattccgacgacatttttgatcaatcccgacggaaaagtcgtgaaagtggtgaccggcacgatgacagaacgcatggttcatgactatatgaatttaattaagccggaggcgtcttcatgaaaaaggtcaaatgtgaatgcgggcacgtgaatccagccgggacggttttatgcgagtcgtgcgggaagccgcttgatgatcaaaaatcgctgcttgcggatatgcggtacgacggcagcgcaaggcgttcgcaaacatataacaaaacaatcgtagataaggtatggaacttcttttcttccgtaaaagtcggaatatggctgatcgtcattactctggcggcgtctgctttcggcacggtttttccgcaggaagcttatctgccgccgggcgcccagccggatacatattatgaacagcagtacggcataatcggccaaatgtattatctgctgggatttcatcacctgtacggctcatggtggtatatgctcctgatcgcatccattggcatatcactggtcatctgcagtctggatcgggtgattcctttgtacagagcgctgaaaaatcaaggagttcggcggaatccgatctttttgaagaggcagcgtctatacagccggacagaaaccgagctgagcggggatgcggctgatagcctcagaacacgattgaaaaaaaagcattatagagtgcgagaacaagagggaagcattctggcggaaaaaggccgtttttcaaggtgggggccctacgtcaatcatatcggtctgatcatttttctgatcggagccatgctgagatttgtacccggtatgtatgtcgatgaaacgctctgggtccgtgaaggcgaaaccgctcagatccccggcactgatggcaagtattacttaaaaaacaaccggttcacgatgcagacatataacaaagacaccgagaaaaaagtattcgccgacgccattgacagagccggaaacggcaaagtcgccaaatccttcacaacggacgcggttttgtacaagagggaaggcgacattgtattcggcgaaaagccgaagcttaaaagagtcaaagaaaacaatatccgcgtcaatgaaccgcttcgctttgactcctattctgtgtatcaggtggactataaagaaaaccagctcgatcagatggtatttcagctgatcgaccaaaaaacaaaacagtcatttggcaaactgaagatcaatcttcttgatcccgacacggactatgatcttggtaacggttacaaagtgcagatcgccagttatcttcctgatttttattttaacaaggacggagaaccgagcacgaaaacgaaggttcctaacaatccggcttttgtctttaaaatcacggctcctgacaagccgaaaggggagaaaagttttgttgcgattcagcagactgttgaaggttccgaaagtaacaagtacaaattaaaattcgaccatgtggaaacgaaaaacattacaggactcaccgtcagaaaagacttaaccttatgggtgcttgccgtcggcggcgcgatctttatgatcggcgtcattcaaggaatgtactggcagcacagaaggatctggatcaaaacaggtgatcatgaagtgcttgtggcgggacatacgaacaaaaactggttcggtctgaaaaaggatatcgaatttgttcttagcgggaccgggattcaagagccggccgatcaaaaagaattggccaaaaatcaggcctagtgaaaaaggagtggtgtcatggcggagctgagcgcaaattttctttatgctgcctttttgatttatttaattgccgtccctgttttcggcggcgccatccggggaacaaaaggtgctaaggacggtaagggccgctggtcggctatcggaatcacgttaaccattttcggatttctttgtcatctcggctacttcattgcgagatggtcggcaagcggacatgcgcctgtcagcaatatgtttgaatttacgacgtcattcggcatgatgcttgttctcgcttttattattatttactttatttacagactgccttcattaggcatgttcacattgtctatcgcgcttttgcttatcgcatatgcaagcatgtttccgacagacattacaccgcttattccgtcactgcagagcaattggctgtacattcacgtcacgacggcggcgctcgggcaggcgattcttgcgatcagttttgtagccggcgtcattttcctgttaaagcatgtcgaccaatccagaccgggcaaaaaaacgttctggcttgaagtcatcatgtttatactcgtgacgaccgtggcatttatcgccgtcacgtcggcattccggctggcggactacaaagctgaatttaattgggtggataaaaaagaagccaaaagcgtcatgatatatgatatgcctgcgcttgtcggcccgcatgagggagaactgcttacggaaggcgcaatgaagccgcttattgagcttccggccattttttcaggcagaaaggtcaatacggtgatctggtcgtttggcgcaggtctcgttttatacggtgggctcaggctgatattcagaaagagaatcagcgctcttatcagcccgctcgtcaaaaatgtgaatctggacttggtcgatgaagtcggctaccgcgctgtttccatcggttttccggtattcacactcggcgcgcttgtgtttgcgatgatttgggcgcagcttgcatggacgcgtttttggggctgggacccgaaggaagtatgggcgctgatcacctttttattttacgcagcgtatttgcacttgcggctgtcaagaggctggcatggcgaaaagtccgcgtggcttgccgtcatcggcttcgccattattatgtttaacttaatttttgtgaatctcgtgcttgccggacttcattcgtacgcatagatgcaaaaagccgatacagttctcaagctgccgcacagtttgttaaaatgaaagtaacagaaggaaagcagggggaaaacgatggatcaaacaaatgaaactaaaatattagtagtagatgatgaagccagaattcgacgccttttaagaatgtaccttgaacgggaaaactatgtgattgaagaagcggaaaacggcgacgaggccattaaaatggggctggcatcagattatgatctggtgctcttggatttaatgatgccgggaacggacggaatcgaagtatgccggcagctcagagaaaaaaaagcgacgccgattatcatgctgacggcaaaaggggaagaagccaaccgcgtccaggggtttgaagcgggtacggacgattatatcgtcaagcctttcagcccgagagaagtggtgcttcgggtaaaggcgcttttaagaagggcttcccaaacatcttatctgacagccaataccccgacaaaaaatgttctcgtcttttcgcatctatccattgatcacgatgctcacagggtgactgcggacggcacggaggtgagcctgacgccgaaggaatatgaactgctgtacttcctggcgaaaacaccggacaaagtgtacgacagggaaaagcttttaaaagaagtgtggcagtatgaatttttcggagacctcagaacggtggacacccatgtcaaacggctccgtgaaaaattaaataaagtgtccccgggagcggcgaaaaaaatcgtcaccgtatggggagtcggatacaaatttgaggtaggcgctgaatgaagttttggaaaagcgtagtaggaaagctttggtttaccattctttcactcgtgttaattgttttatttattttaacggtgctgcttctggaatttatagaaaattaccacgttgaagaagcggaaaaagatttaacgcagcttgccgataaaattgcggtcataatagaaaatcatgaagaccagccgcttgccagatccatcacgtgggaactggcggacaatttaacgagcatcgcgatcattcaggatgataagcatgtctggtattcgcccaatgacgataatcatttatcctctattacattagagcagatcaaacatgaccgggatctgcacaaggcgctgacagaccgcaaaaaagtaagcaaacgcgcggtccccaacaatgccggttcggataacgaacggctgatcgtcggagtgccgtatgaaaaagacggcaaaaaaggcatggtctttttatcccaatcgctgcttgccgtcaaagatacgacgaaacatacaacacgctatatttttcttgcggcgggcattgccatcgtcctgacaacgtttttcgcgttctttttatccagcagggtgacatatccccttcggaaaatgcgggaaggcgcccaagacttggcgaaaggaaagtttgatacaaaaattccgattctgacccaagatgaaatcggggaactggccattgcctttaatcagatgggacggcagctcaatttccatattaacgcgctgaatcaggaaaaagaacagctgtccaatattttaagcagtatggcagacggggtcatcaccattaatatcgacggcaccattttggtgaccaacccgccggccgaacgttttctgcaggcatggtattatgagcagaacatgaacattaaagaaggagataaccttccccctgaagcaaaagagctatttcaaaatgcagtgaacacagaaaaagagcaaatgattgaaatgacgcttcaaggaaggtcatgggttttattgatgtcgcctctttatgcggaatcacacgtccgcggcgccgtggccgtgctccgtgatatgaccgaagagcgcaggctcgataaattgcgtgaagacttcattgccaatgtcagtcatgagctcagaaccccgatttctatgctgcagggatacagtgaagcaatagtggacgacattgcaagcaccgaagaggagaaaaaagaaatcgcgcagatcatttatgatgaatctcttcgcatgggccggctcgtcaatgatttgctggatttggccagaatggaatccggacatacgggcctgcactatgaaacggtaaacctgcatgaatttctggagaagatctcccgcaaattttccggggtagcgaaggaaaaaggcgtttcgctcacagaagacatctcggtgtctcagccggagtgtgtctttgacgaagataaaatggaacaggtgtttaccaaccttatagataatgcgctgcgccacacggagtcaggcggaagcgttcatatcgcggctcagaccgtaaaagacggactgaaaatcgatatcaaagattccggctctggaataccggaagaagacctgccttttatttttgaacgtttttataaagcggacaaagcaagaacaagaggcagggcggggaccggactcggactcgccatcgtaaaaaatatcgtggaagcccacggcggctcaattgcggttcacagcagcatcgacaaagggacgacgtttacattttatattccgacaaaagtgcaggatgacgtctgaaattgacgaacaatcttgttccatacgaaacacccgcatgttctgcgggtgttttttatttgtttctcctttaaaaatttaagaatatgttaatataaattcccttccaaattccagtttctcgtaatatagttgtaatgtaacttttcaacgcatttttacgacaaaaaagtgaacggaggggtttcccatggaagaaacctttcagatattatatgatgcataccatcaagatttatatcaatttttattttatatggtaaaagataagtcgcaggctgaagatttgacgcaggaagtgtatatccgcgtcttgaattcctatcatacatttgaaggaagaagcagtgaaaaaacatggctgttatccatcgcacgccatgtggcgattgactggttccgcaagcagcagacgatcagacagcgtattatgggtacgtttgattgggatacacaagatgtcagagatcagcatttgcttccggacgaactcgccgtacagcatgaaaacgtccgggaaatttataccgcgcttgatcattgcaccattgatcaaagagctgttattatcttgagatttattcagggatattccattcaggaaacagccgccgctctccgcttctcggaaagcaaagtcaaaacgacccaacacagagggctcaaaatacttcggaaacagatggagcttttgagggaggagctaatggatgatgaagtcatattggaacgaagaaagagtagaggagttgttaagacaacttccggcggttagagatcatcgttcacccgaggccatttaccggaatattgaaacaggtaaaccgtacaggaaaaaaccggcccgaagctggatcggccccgccgcagccggcgtctgcgcattgtgcatcgctctgattatatctcctcacctgatgacaaacaaatcttccggtgatctaaccgctgacagccgccagactgaaaaagccagtcagtcagcttctgtcaagccgccggatcagaagacgttcgtcgtctcaaaccaaaacaaaaacaattacattaccttggcatttgccgattcagaaacatccgccgtcattccggtcagttttgaaaaaaagaagccggatgaatcggtttcagaggctttatccgaagcggaaaacctagaagtgcccgaatccttcctgtctgtgccgaaccttttggacggtgtgcaggtaacggcggataagaaggacttgcttgtgcaggtaaacggacggttctctatcgaatcagttgccgatgctgacttattgaaaaagatgctgaaagagactttgacatggagtccttacgagcggattaaattgaaaaaggttcaaaacggagccggacaggatttttataaatcttacggcatttccgctgagatgtccgtacataaacagacaaaccgggcgtatttttcttacagcgacagtctgggacaagagtatctcatcccgtctgaacaaacctattattcagtatatcaggctattgacgggatgaagacaacagacggaggctcacagaccgcgagcattatagaagcagatgcgattgcatcggtatcggaaagggaagacggtgagcagctgcggattcaattgtccgaaaaacatacggttgaagattcgctggaagggattttaatgatcgaagggcttctgttaactgcgaaggaattcggttattctgaggtgctgttcacacatgcgcatacaaagaaaatcggtaattatgatgtgacaaaacctatcgctgtgcctgccgcgcctaatccgcttccaagccattaaacgtaaaaaacccaaaacatatgaatgttttgggttttttgttggttacggaaggtcaatcagtttaacggaaacaatatcctgaattgaagtcagctcattgacgactttatcatctaaatgtttatcaaaagaaagcatcataatggcttctccgcctttttctttacggcctacctgcatggtagcgatattgatatcgttatcgccgaggatgcgtccgacgcgtccgattacaccagtcgtatcctggtgctggatataaacgaggtggccggcaggatttaagtcaatattaaagccgttcagttcaacgattcgttcaccgaagtgagggatatacgtagccgttaacgtaaatgtgctccggtctccggttacttttacgctgatgcagttatcatatcctgattcattggaggaaatcttctcgctgaagctgattccgcgttcttttgctacaccgccggcgttcacttcattgaccgttgagtctacacgcggttttaagaaaccggacagcaggctttttgtaataaatgatgtttcaagtttggcgatggtgccttcatattgaatcgcaacatctttgacgggttccttcatacattgtgatacgagacttccgattttatcagcaatttggtgataaggctggatttttttgaattcatctttcgtcatcgcaggcaggttgatcgctgacatgacaggcagaccttttgcaaactgcagcacttcttcagaaacctgtgccgcgacattcagctgtgcttctttcgttgaagcgcctaagtgaggtgtggcgatcaccagcggatggtcgggaagctttgattcaactggcggttccacttcaaacacgtcaagggcagcgcctgcgacatggccgctttccagcgcttccaaaagcgccgcttcatcaataataccgcctcttgcgcagttgataagacggacgccttttttcgttttggcaatggtttctctgttaagcagtccttttgtttcctttgttaaaggcgtgtggacggtaatgatatccgcgctttcaagcacttcttcgaatgtccggctgtttacgccgattttgccggctctctcttcggttaagaaaggatcgaatacatgaaccgtcataccgaacgctctggcgcgctgggcaatctcgcttccgatccggcccagaccgacaatgcctaaagtctttccgtagagctccgccccgacaaaagccgtccggttccattctctagattttactgagatattggcttgcggaatgtgtctcattaatgaagaaatcatcgcgaatgtatgctctgccgttgaaatggtgtttccattcggcgcgtttatcacgataaccccatgttttgtggcctcatcaatgtcgatgttgtctacgccgacaccggctctgccgacgatttttaaagaggtcatttttttaaacaattcttcggttactttcgtggcactgcggactaacagggcatcaaaggtatgtaattcttcttctgcatccgcgacgtttttttgaacaatttctataaagtctgattccatcagcggctttaagccgtcattgctcatcttatctgagaccaaaactcgaaacattgttagatttcctcctagtttagctgactaaatatctgataatttatcatattctcaatagagtgtcaatgtgtattgacgcagtaaaggagaaaaggaaaccgctgaatcagcttaaattgggcttccccaatattttatttaaatttgagcagttctctatacaattgcaatttgatcatatataatgtgaataaattcataagatcaatcttcggggcagggtgaaattccctaccggcggtgatgagcatcatgctctaagcccgcgagctgcttcggcggcaggatccggtgagattccggagccgacagtatagtctggatgggagaagatggaggttcagcagacgttttgatgcttatatcaaacgtttctttgccaagccttagtaagctcccgctttttaacaaaagcggtttttttattggggcgcaaaagaacctttcctcttttcgagagatttgatcgaaaaggagagagcattgtgaaagtaaaaaaattagttgtcatcagtatgcttagcagtattgcttttgtgcttatgctgttaaatttcccgtttccgggtctgccggattatttgaaaattgatttcagtgacgttcctgcaattatcgccattttggtttacgggcctgcggcggggattgcggttgaagcgattaaaaatattctgcagtatatcattcaaggaagcatggccggcgtgcctgtcgggcaggcagccaattttatcgcgggaacgctgtttattctgccgacggcgtttatgtttaaaaagcttaattctgcaaaaggtcttgcggtgagcctgctggccggaaccgcggcgatgaccgtgctgatgagtattttgaactatattcttatcctgcccgcgtatacttggtttttacattcaccggcactgtcaaacagccagttaaaaacggcggttgtcgcaggaattctgccgtttaacattgtaaaaggcattatcatcaccatcgtctttacgttcatctttacgaagctgaaaccttggattgaacaaaaacgcagcatccaaacacaataaagattgaaagcgtccgctctgtgaaaacagccggacgcttttttgtttgtgctgatcggcaaaaaataagactccggccgataacagccggagtcttattcaggacgaaaaagctcctctcacggggagggcttttttattcgtatttcagcgggtcgccttcgaacggttcatccgcaactttgattgaatcagtagggcatccttcaaatgcgtcaatcatatcttcttccagaacttccggaacttcgacgacgcctttattttcgtcaagcgtaacgaacgcaatgccttcatcatcataatcataaatgtctggtgccgcagctccgcaggcgccgcatgcaatacacgtatctttatctacaattgtgtactttgccatgaataaaacctcccagattgttcgtgttggaacaaatggtttaccttatatatttttaaatataacacctattcctcttacttattgtaatgatgttagtgtcaaatttcaacagaaaaatgattgagaatgcttatcacataagggattctctttagcacttccccctaaaagatgactttaaacgtcaaatttatatgaaaatctgttaaaataaaaagaaccaaaaaacgaaacttgtcacagaagaaatgtaggtgtgtttagattggcgataaactactttgataccgtggttctcgactgtctggacaaaatagacggcgaacggactccgagtgctgtgtttcatttattaaaaggaaaaaagtcgtctcaaaccattcaggatgccggcttatttcagatcgctaaatatttcggcatggcttcacagtgtgaacgcggcgatattgcggcttctttgcataaactcaccgagaactcatacatcacagccggaaaagaagagggaacgtggaaagtgactgcgcgcggcgttcaaaggcttgaacgggcgtttgccgagcggccttggccgaagcactgccacggcgcgaattatcaaacgcctgctgtcaccctgtggaggcggctttccctgctcattcaagtcctgtcaaacaaagagcatcaatgcagtcaatatatcccggttaccaacgatgtgcagacgctgagatgggtcaaacggttcatgcggaaaaacagagatgctaaagagctttccgtccaaatgcatgacgcgctgtttcatcttctgcaaggcgtaagtgaacggcaggcgcttatttttgtctattctttaacttcattcaacagaatcggcaaaacgaataagcagctcgctctccagctgaacgaagatgaatggtatgtgtccgtccagttttggggagcggtacattatgttattcaatcgcttccgcaatgtgcatatcccgctctgcgcgagctgttgtccgatctgcaggcggaaagcgcgctgacacagtctgccagaaaaacctttgagctgttggaaaaagggtttccgattgaacggatcgccgcggtcagaaatttaaaaactgccacaatcgaagatcatatcgtagaaatatcattgcatcagcctgcattttttatagaacagtatctttctgaagaggaacagcgtatgataacggcatttgcaaaacagcatcaaacgaataaaattaaacggattcgcgaaggaatgcagatgcgcttcagctattttcagatcaggctggcgctggcaaagacggtgaaccagcatgactgagctgcataaagctttatccaagtattttggtttgcattcctttaaaaaagggcaggaagagattatgactagcgtgctccaaaaaaaggatacgatcgccatgcttccgaccggcgggggaaaatcattatgctatcagctcccgggttacatgatggacgggctggtgctgattatttcgccgctcctttcattaatggaagatcaggtgcagcagctgaaagcgaaaggagaaaagcgggttgctgcattaaacagcatgctgaattccgcagagcggcattttattctcagcaacatcagcaggtataaatttctctatatgtcccctgaagccctttcttcaccttatgtactgaaccgtttgaaaaacgttccggtcagtttatttgttattgatgaggctcattgcatatcagaatggggacatgatttcaggcctgattactcgaagctcgggcctttcaggcaggcactcggaaagccgcctgtattggcgctaaccgcaacagcgacaaaagaaacactcagagacgtgacggatgtgctcggacttgagcatgcggtgcgtcatctttattcagtcaaccggccgaatattctcctggcggcagaacatttggcggataatgccgagaaaataagcaggctcacggagcttgccgaaaagcttgaaggcccgggtatcatatattgtccgaccagaaaatgggcggaagagcttgcggctgagctgaatgaaaaaacgggaaagcggacggattattatcacggcggaatggatacaggggacagaatcttaatccagcagcaatttatccataaccagcttgattgcatctgctgtaccaatgcgttcggcatgggtgtggataagtcagatatccgctttgtcattcacttttatcctccccaaacggctgaggcctttatgcaggaaatcggcagagcgggacgcgacggcagcccgagtgtcagtattttgctgagggcgcccggcgataccgagcttcagcagcagattattcagacagaaagcctgtctgattatgatctggaaggcattctggccgtcatacgggatgccggtacgagtgatgaacgaaagcttcgggacgttctgatcaacaagggcgtccaggaaacacaggcgcgaacggccgtccatctgtatctgcaaggaaaaacaacaaaagagcagctgcaggaagaactgacataccgcgtggaaaagaagctgcgtaaaatgaatcgtttttcggcgttattagagcggaaagaatgtataagagaagcgctgctgtcttattttgatgaatcgtatgagcctgaaggtcaaaccggacaatgctgcagcagctgcggacttgatctggctccgtacgagcaaaaaggagaacgtaaaaatatggaacggtttgaagattggaagctggaattaggccggattttcggttcagagtctgcgggtgagttcagctgagacggcaaagcgaattgatccggcagctctcagaccgggagattgtgatgcagctgtatgccacccaattgctcatattggcggtttcagctgttatcggctttttcttttttaccgacattcacgattttttaaagctgtggcatatacgtgacgataatatcatatggtacggtgtaactcttgctgtccttgtcatttttgccgatctggcggtgatgaaatggtgtccttcgcatttatatgatgacggcggcattaatgtattgctttttaagaacaggccggttttgcacattttgtttttgacgcttctcatttcgttcagcgaagagattttgttcagaggcgttctgcagacacatatcggcttatgggccgccagcttcatttttaccgtgcttcatttcagatacttggcgaagtggcttctgtttatgatggttgcgggcatcagtcttttgctggggcttatctatgaatggaccggcaatttattcgttccggttacagcgcattttattattgatgcggtatttgcctgtcagatccgttttcaatatgttaggaggggtttgcatgacggaaatgtcaagagttgaaagaagaaaagctcagctgcgtgccgagcagcagattgccgcggccgcggatgaacaaattgaatatcttgaagacagcctcccgacaagacaatctgtaaaagaggagcgtaaaaaaaaggaagagcaggtaaaggaaaaaaccaaaacaaaaacgccgctgttcacttttctgaccgtcctgttcattatcgtaacaatcggtgtctttttcggtcttctttatatgacgaacagcagcagatttgacccgaaggactatgaagatgtcttcatagaccacagtgaaagcgcgcctgccgttattccgaaaggcgctcagaaagaaacgtcagaaaccgctcttttagaacaaccgaaaaaaaagtctgatgacaaagataaaaaagaagcggctgcatctgaaaaaacgaaagaaaaaccaagtgaaaaaacggaaacgccctcagaaaaacaagtaaagccgacagacaccgaatacgcggagacaaaacagcagtctccgccggctgtccgtgaaaaagcggctccggctgccgcgagtgatcaagccgggactgtcccgaaaaatgtgcggaccgtacagcatactgtacagccgaaagaaacgctttaccgcatttcaatgaaatattataaaagccgggcgggcgaagaaaaaatccgcagctacaacggattaaacggaaacgacgtgtacaccggccaggttctgaacattccgctgtctgattaaaataaatgcatgttttcaccgcgtttttcatatagtgtaccaatgaaaacggacaaggtgtgaagcgcatggattctttatggaagcaattagacagatttgctgacggaccgacgaaacaaatgcttcaggcgctggtgaaacggaaattaaaatacgaaaattatgccgcacaatgccgaagatggcagtgggcgtccctcgtttgtttttccctgatgtgcatactgctgatgtttaaaagctttaatgccccccaagcctctccgcagctgattctgcaggaaatattaggccatacggtttacttgtgctggattatggcttccgcttttgcgtattgcacttcttattattttaaaaaaaaggaagaaaaagctgagggtgaatttcataaactgagatgtgaaattatccaaaaaagcacggatttatggccccagcctgaaaaatggagggcgagagaatctgtttttcacttgatgaaacatcggtatgatatcaatctttattttgaaagcaaataaaatgaggcgttttccggaaaggatagaaacgtctttttttgtttgtccgtctaatgtaagacaatgacagaatggagagtgcgtttatgaagcttacagcgggaattctcggctcattggcgggagcggctgcggttatggcggccgttatgtacaaaacggcaaacggcagccatctgaaaacacatacatttacgcttgataaaatgaaggggatgaagccgctcaccatcttctttatatctgacgtgcaccgccgtttaattgatgaaaagcttcttcgcgaagcggcaggttataagccggatgccgttttgctcggcggtgatttggcggagggcggagttccttacgccagaattgaagaaaacatcaaacgtctgacggctctcgcgcctgtcatgtatgtgtggggaaataatgattacgaggtcagccagcaaaaactgctctcacttttacgggcatataaagtgatcccgctgagaaatgaatcggttcagtttgcttataaaggggaaaccgttacgatctgcggcgtggatgatatcaggatgatgatggatgattacgattctgcaatcagatatacggatgctgacaaagtaaacctcctgctttgccataacccggacatccatgagcaaatgagggagtcagacgggattgacgctgtgttcagcggccatacgcatggcggtcaaatccgtttcggccggttcgggccgtacgaattgggcgggacgggaacggtaaaaaaagcgcattacctgatcagcaacggctacgggacgacaaaagttccgctgaggctcggggcgaaaccggagacgcatatgattacgctgtgcggaccggatgagccgtcttcctgaaacaaacccggccgctgtgataaaaaacggcattctgcttgtcttcccgctgtacacagtgtaaactgataacaaattaagaacctatgactcatttattcatatactgtgttatatgatttgtgtgcaagaagaggcaggagggaacattatgcggcttgagcgtctgaactataataagattaaaatctttttaaccctcgacgatctgactgatcggggactgacaaaagaagacctctggaaggactcgtttaaagtccaccagttatttaaagatatgatgaatgaagcaaatacagagctcggctttgaagcgaatggtccgatcgcggtggaagtatattctcttcaggcacaaggcatggttgtgattgtaacgaaaaatcatgacgcggacgcagaagatgacgaatatgacgatgattatatcgagatgcaggtcaaacttgacgaaagcccggatattatttatcagttccattcgtttgaagatatcattcagcttgccggaagccttcaccgaatcgggattaccggcggcaccgtctaccactatgagaaccaatactatgtaagccttgaagacctcggctcccgttccgccgaaggcgtcatcgcggtgctggctgaatacggacacccggcgacaattacgatttacaggctccatgagtacggaaaactcatcatggacggcaatgctgtggagaccatccagaaacatttttcataaaaaagatttgaaacggcagctgttttcagcggccgtctttttttaagcgaaataatggaaaaatcattgtctttcttctatgcacggagatattgaaggtgtatactagtcactgaaagggagcatgagagaaacagaagattttaggaggttaactcaaatggcagccgatcgattcaccggtcataatgaagaagacaaacatgatgtattaaaatcaacccaaaccgtaatacataaagctctggaaaaattggggtatccagaagaagtgtatgaactgctgaaagagccgctcagattattaacggttaaaattcctgttcggatggatgacgggtctgtgaaaatattcacaggctatcgtgcgcagcacaatgattccgtaggtccgacaaaaggcggcattcgttttcacccgaatgtaactgaaaaagaggtgaaagcactttccatctggatgagtttaaaatgcggaattattgatcttccttatggcggtggtaaaggcggaattgtttgtgatccgagaaatatgtcattcagagagcttgaaagactaagcaggggatatgtcagagcaatcagtcagattgtcggaccgactaaagacgtcccggcacctgacgtatttacaaactcacagattatggcttggatgatggatgaatattcaagaattgatgaatttaactcacccggctttattacgggaaaaccgcttgtactcggcgggtcccacggcagggaatcagcgacggcaaaaggcgtcaccatctgcataaaagaagcggccaagaaaaaaggtctcgatattcagaacgcgcgcgtcgtcgtacaaggtttcgggaatgcgggcagctatctggccaagtttatgcatgacgccggcgcgaaagttgtcggaatttctgacgcgtacggaggcctttacgatccggacggtcttgatattgattatctgcttgaccgcagagacagcttcggaacggtgacgaaacttttcaatgacaccattacgaatcaggagctgcttgagctggactgtgatatacttgtcccggcggcgattgaaaaccaaattacagaagaaaacgctgaccgcatcaaagcgaaaatcgttgtagaagcggcaaacggaccgacgacactggaagggacgaaaatcctgacagacaaaggaacgctgctggttcccgatgttctggcgagcgccggcggtgtaacggtttcttatttcgaatgggttcaaaataaccagggcttctactggagtgaagaagaagtcgaggaaaaactggaaaatatgatgataaaatcgtttaataatatttatgaaatgtcccaaaaccgccggattgacatgaggcttgcggcttacatggtcggcgtgcggaaaatggcggaggcttcgcgtttcagaggctggatataaacgaatcgtttgcataaacaaaaaaaatctcctatgataatataggagattttttatatgagtggaaacttatgatggaaatgccaatcgcaggagttgaaggacatgacagaagaaaaagcaattataataggcggaggtccttgcggattatcggcggctatacatctgaagcaaattggcgtgaacgcgcttgtgatcgaaaaagggaatgtcgtaaacagcatttataactatccgacccaccaaacttttttcagttcaagtgaaaaattggaaatcggcgatgtcgcctttattacggaaaacagaaaaccggtccgaatacaggctctctcttactacagagaggttgtcagaagaaaagagctgcgcgtaaacgcctttgaaacagtggagcgcgtaacgaaacaggaagacggccgttttcttgtagaaacatcaaaagaccgctacctcactccgttttgtatcattgcgacaggatattatgatcatccgaattatatgaacataccgggtgaagggcttcctaaggtatttcattactttaaagaaggccatccttattttgataaagatgttgctgtgatcggcgggaaaaactcaagtgtggacgcggctttggaactcgtgaagtccggtgcgcgcgttacggtgctctacagaggacatgagtactccccgagcatcaagccctggattctgcctgagtttgaggccctcgtcagaaacggcacaatccggatggaattcggcgcttgtcttgaagaagtgacggaagatgaaatcattttccgctcgggccgaaatgagacggtccggctgaaaaacgatttcgtatttgccatgacgggataccatcccgatcacggtttcctcgaaaaaatcggtgtgcggattgatgctgaatcaggccggccgtttttccgggaagaaacgatggaaacaaatgttgacggtgtttttatcgccggagtcattgcggctggaaataacgccaacgaaatttttatcgagaacggccgttttcacggcggcttgatcgcaaatgaaatatcaaaacggctgggtgcagagagcatatgatcattcatatgctctttttttaaaaaattgaaagatgtaaaaatatgaacaacatggtacgatagatataggaatataaaggaaagaggttgcctgatgtttgcaatcatctctgcaggaattgctcccggcattgcgctgttaagctatttttatttaaaagatcagtatgacaatgaacccgtacatatggtgctgaggtctttttttctcggggttgtccttgtgtttccgaccatgtttatccaatatgttcttgaaaaagagcatgtggggggaggaagctttttcgtttcgtttttgtcttcgggatttctggaagaatcggtgaaatggttcgttctgatgatcagtgtgtatccgcatgctcattttgatgagcattatgacggaatcgtttacggggccagtgtgtctttaggatttgccacgcttgaaaatattctgtatttattcggccacggcgttgagcatgctttcataagggcgcttctgccggtctcctgccatgcgctgatcggagtgattatgggattttatctcggaaaagcccgcttttcgcagaaaaaagcccgtgtcaaatggcttgtgatttcgctggctgtgccttcatgtctgcacggttcttacgattttattcttaccgccctcaatcattgggtatattatatgctgccgcttatgctgtttttatggtggttcgggctgcgaaaggcaaaaaaagcacgctccgttaatatgatccaagtgtgaagaaaccgcgcgtcgcgtgcggtttctttttttatgccttgacgagggataagaaggaaacgtgcataaaaataacctcgtgacagacaatacgggtacactttaaattttgcagtaggaggcttgaagagatgaagtgcaaaggagcctttatggcatgtctcattctattttctttcgccgccgctttcttcgatcatcatgaaacggttcatgcgttttcaaatcaagtgattcaaagaggcgcgacgggtgatgatgttatagaattgcaggcccgtcttcaatataacggattttataacgggaaaatcgatggtgtttacggctggaccacatactgggccgtgaggaattttcaggagaaattcggcatgaagccggttgacggcctcgtcggcgcgaaaaccaaacaggtgctgatctctaaatcaaaatattaccgtgaatatgtaatggagcagatccaaaaagggaatacgttcactcattatggcaacgtcccattggaaaaccaaacaaaaccgagagccggaacgcagaagccggctgcgggaacgaataagcctgctcaaaagccgcaaaacaatacaggcggtcagtcaaatcaaaagcaaaatacgacagcggccaatatgcctggcggtttctcaaacaacgacatcaatcttttggcgcaggctgtgtacggggaagcacgcggtgagccgtttgaaggacaggttgccatcgccgcggttattttaaaccgtattaaaagcccgttatttccgaatacggtggccggcgtcattttcgaaccgctcgcgtttaccgctgttgccgacggccaaatatacatgcagccgaatgaaagagcaaaagaagcggttcttgatgcgatcaacggctgggatccttctgaaaacgcgatttattatttcaaccctgatacggcgacaagcaaatggatttggggacgtccgcagataaaaagaatcggaaaacacattttctgtgagtaaaagtacgcaaaatgaggtgttaacatgattagaggaattattatcgctgttctcggtgtcgcgatcgccgcaaccggatactggggatataaagagcatcaggaaaaagatgcggtccttctgcatgcggaaaataattatcaaagggcttttcatgaattgacgtaccatgtagatcagcttcacgacaaaatcgggacgacgcttgcgatgaacagtaaaaaatctctgtctccggcgctcattgatgtatggagaataacatctgaagctcataacaatgtgagccagctgcccttgactcttatgccttttaataagacggaggagtttttatccaacataggagatttcagctataaaacatccgtccgggatttagaccaaaaaccgcttgataagaaagaatatacaacactgaacagcctgtacaaacaggcggagaacattcaaaaccagctccgcagcgttcagcatctcgttatgagcaaaaatttacgatggatggatgttgagatggcgctcgcctctgacaaaaaacaaagcgataatacgatcgttgacagctttaaaacagtcgaaaaaaatgtaggcgctttttctgaagacagcatcagccccacatttacgggagcaaatacagaacgaaaaggttttacgcatctgaaaggaaaacaaattacggaaaaagaagcggtcaaaatcgcacaacggtttgcgcctgatcataattattcaattaaagtggtcaaaagcggcaggaagacgaatcgggacgtatacagcatccgcatgaaagacgccgacaacaagtcttttatctatatggatattacccaaaaaggcggacatccggtctatttgattcaaaaacgggccgtgaagaaacaaaagatcagcctcaatgaagcatctaaccgggccgtcgcgtttttaaagaaaaatggatatgaaacaaaaggtctcgaaattgatgaaagcgcgcaatataataacatcggcgtcttttcttttattcccgtggagaaaaatgtccgcatttatccggaagccatccgaatgaaagtggcgctggatgatggtgaagtcgtcggtttttccgcgcgtgattacctggcggcgcaccgcacgagaacgattccggctcccgctttgtcagctgatgaagcgaaagcgaagctgaataaaaatgttgaagtgcgggagacgcggcaggcgctgatcacaaatgagcttggtcaggaagtgctttgctacgaaatgctcggaacgatcgggaaagacacgtatcaaatgttcatcaatgcggacgacggaaaagaggaaaaaatagaaaagttaaaaagtgcagaacctatatataaagacctataaaaataaaggaggaaaggactaaaagtcttttcctttttttcgttacatgctttaataaaagcataaataatgaaagagtgaaggcccatgatagctgtcggagattatatttggattgaatacatagagaacaatgagcccaaaaaagcgaggagcaaagcagtaagcgttgaaaacggcgaactgcacatctcatatcccgtcgatctggattcgggacggacggtctttttgcataaaggattggaaataacagcggaatttatgggggatggccaagtgccgtatcaatttaaaagcataatcaaaggaaagaaaaaagaccccattccgatgatcggattggacatccctcctcagaagaaaatgaagcggattcaaagacgccgatacgtccgtgcagaagcagtattggatgtatccgtcaaaatggaagcgaaaaaaaccgctttccaaacggtttcctctaatatcagcgccggcggaatcgctgttgtgatgcctgagcatatttccgcggaaccaggtgaaaagctgtatgtctcattttctcttcccggcaaggaaaatacggcggatataacggctgaggctgttacccagcggattttttatgatgaaaaggcggataaacaaaaaatgacgcttgaatttacagaaatcggcctcgcagcgcagcagcttttactccaatattgcatgcgcgcgcagctgcagcagagaagaaacagtctgtcggaataaacagcagcgcacttttccatactaatcctaatggaggtgcgcgtgtatgaaaacgtttgaacgtctgctggtcaaattggtctgcattcagcttatcattttgggcgcggtgcagtttttgcttcattatcagcctattgaaccttatatttcgaaagctgtgaaatatgagggagttgataaaatggagaaaaaagaatggattgaaacggtaaagcggtaaatcagctcaattttttcgccccttttccggcagttcatgatacaatccatagaggagtaaagagcaaggagagagattatggacaagaaattatcaattgcgatcgacgggccggccgctgccggaaaaagcaccgttgctaaaatagtggctgagaaaaaatcatatgtgtacattgatacaggagcgatgtatcgtgccattacatatacggcgctcaagcagaatgccgatttaactgatgaagccgcgcttacagagctgctgaagcgtacggaaattgagcttgtatccgctccggaaggacaaatcgttctggtaaacggagaagatgtgacagaagaaatccgaaaagacgaagtcagcaaccaagtatcaatcgccgccaagcataaaggcgtcagagaagaaatggtcaaaagacagcagcagctcggacaaaaaggcggtgtcgtcatggacggccgtgatatcggtactcacgtgctgcctgatgccgaagtgaaaatttttctgctcgcgtccgtagaggaaagagcgaagcgccgatatgaagagaataagaaaaaaggctatgacgtgaattacgagacgctcattgaagaaatttccagacgcgacaagctcgattcagagagggaagtttccccgctgcgcaaagcggaagacgcgattgaaatcgatacgacgtcactcagcattgccgaagtcgcgggaaaaattctggagatcgtcgaacagaaatcacgttaacttcgggcggagcgctttataatttttttcgaaagacaagatgttattgcttgacaaaccagtccatttattagaagttaatactaataaaactttttattgatcattcaaaatcttttttggatgattctttaatacatattcggctgaaaagcggacattcacatgttcagctttcaaaccgtattaattaagctgtgtaggtttggaccaaggaggttattcaaatgacagaggaaatgaatcaaattgatgttcaagtgccagaggttggagatgtagtaaaagggattgtgacaaaggtagaggacaagcatgtagatgtcgaaattgtcaatgtcaaacagtccggaatcattccaatcagtgaattatcaagtcttcatgtagagaaagcatcggatgtcgtaaaagttgacgacgagcttgacctgaaagtaacaaaagtggaagacgatgctttgattttatctaaacgtgccgttgatgctgaccgcgcttgggaagaccttgaaaaaaaattcgacacaaaagaagtgtttgaagctgaagtgaaagatgtggtgaaaggcggcctcgtcgttgatatcggtgttcgcggcttcattcccgcatcacttgtcgaagctcatttcgtcgaggatttcactgactataaagggaaaaccctctctcttatcgtcgttgaactcgaccgtgataaaaaccgggtgattctgtcacaccgggctgtagtggaaaaagaacagacagccaaaaagcatgattttctccaaacgcttgaggttggaagcgtgcttgaaggaaaagtg
